United States Patent Application Publication US 2026/0263602 A1, published September 10, 2026 (application 19/461,064).

The application's sequence listing, which the Patent Office published only in electronic form, follows.

SEQUENCE LISTING (1365 sequences)

SEQ ID NO: 1 - RNA, 3240 nt, Homo sapiens
  source 1..3240: mol_type = genomic RNA
gccacaagcctccaccccagctggtcccccacccaggctgcccagtttaacattcctagtcataggaccttgacttctgagaggcctgattgtcatctgtaaataaggggtaggactaaagcactcctcctggaggactgagagatgggctggaccggagcacttgagtctgggatatgtgaccatgctacctttgtctccctgtcctgttccttcccccagccccaaatccagggttttccaaagtgtggttcaagaaccacctgcatctgaatctagaggtactggatacaaccccacgtctgggccgttacccaggacattctacatgagaacgtgggggtggggccctggctgcacctgaactgtcacctggagtcagggtggaaggtggaagaactgggtcttatttccttctccccttgttctttagggtctgtccttctgcagactccgttaccccaccctaaccatcctgcacacccttggagccctctgggccaatgccctgtcccgcaaagggcttctcaggcatctcacctctatgggagggcatttttggcccccagaaccttacacggtgtttatgtggggaagcccctgggaagcagacagtcctagggtgaagctgagaggcagagagaaggggagacagacagagggtggggctttcccccttgtctccagtgccctttctggtgaccctcggttcttttcccccaccacccccccagcggagcccatcgtggtgaggcttaaggaggtccgactgcagagggacgacttcgagattctgaaggtgatcggacgcggggcgttcagcgaggtagcggtagtgaagatgaagcagacgggccaggtgtatgccatgaagatcatgaacaagtgggacatgctgaagaggggcgaggtgtcgtgcttccgtgaggagagggacgtgttggtgaatggggaccggcggtggatcacgcagctgcacttcgccttccaggatgagaactacctgtacctggtcatggagtattacgtgggcggggacctgctgacactgctgagcaagtttggggagcggattccggccgagatggcgcgcttctacctggcggagattgtcatggccatagactcggtgcaccggcttggctacgtgcacagggacatcaaacccgacaacatcctgctggaccgctgtggccacatccgcctggccgacttcggctcttgcctcaagctgcgggcagatggaacggtgcggtcgctggtggctgtgggcaccccagactacctgtcccccgagatcctgcaggctgtgggcggtgggcctgggacaggcagctacgggcccgagtgtgactggtgggcgctgggtgtattcgcctatgaaatgttctatgggcagacgcccttctacgcggattccacggcggagacctatggcaagatcgtccactacaaggagcacctctctctgccgctggtggacgaaggggtccctgaggaggctcgagacttcattcagcggttgctgtgtcccccggagacacggctgggccggggtggagcaggcgacttccggacacatcccttcttctttggcctcgactgggatggtctccgggacagcgtgcccccctttacaccggatttcgaaggtgccaccgacacatgcaacttcgacttggtggaggacgggctcactgccatggtgagcgggggcggggagacactgtcggacattcgggaaggtgcgccgctaggggtccacctgccttttgtgggctactcctactcctgcatggccctcagggacagtgaggtcccaggccccacacccatggaactggaggccgagcagctgcttgagccacacgtgcaagcgcccagcctggagccctcggtgtccccacaggatgaaacagctgaagtggcagttccagcggctgtccctgcggcagaggctgaggccgaggtgacgctgcgggagctccaggaagccctggaggaggaggtgctcacccggcagagcctgagccgggagatggaggccatccgcacggacaaccagaacttcgccagtcaactacgcgaggcagaggctcggaaccgggacctagaggcacacgtccggcagttgcaggagcggatggagttgctgcaggcagagggagccacagctgtcacgggggtccccagtccccgggccacggatccaccttcccatctagatggccccccggccgtggctgtgggccagtgcccgctggtggggccaggccccatgcaccgccgccacctgctgctccctgccagggtccctaggcctggcctatcggaggcgctttccctgctcctgttcgccgttgttctgtctcgtgccgccgccctgggctgcattgggttggtggcccacgccggccaactcaccgcagtctggcgccgcccaggagccgcccgcgctccctgaaccctagaactgtcttcgactccggggccccgttggaagactgagtgcccggggcacggcacagaagccgcgcccaccgcctgccagttcacaaccgctccgagcgtgggtctccgcccagctccagtcctgtgatccgggcccgccccctagcggccggggagggaggggccgggtccgcggccggcgaacggggctcgaagggtccttgtagccgggaatgctgctgctgctgctgctgctgctgctgctgctgctgctgctgctgctgctgctgctgctggggggatcacagaccatttctttctttcggccaggctgaggccctgacgtggatgggcaaactgcaggcctgggaaggcagcaagccgggccgtccgtgttccatcctccacgcacccccacctatcgttggttcgcaaagtgcaaagctttcttgtgcatgacgccctgctctggggagcgtctggcgcgatctctgcctgcttactcgggaaatttgcttttgccaaacccgctttttcggggatcccgcgcccccctcctcacttgcgctgctctcggagccccagccggctccgcccgcttcggcggtttggatatttattgacctcgtcctccgactcgctgacaggctacaggacccccaacaaccccaatccacgttttggatgcactgagaccccgacattcctcggtatttattgtctgtccccacctaggacccccacccccgaccctcgcgaataaaaggccctccatctgcccaaagctct

SEQ ID NO: 2 - RNA, 2799 nt, Homo sapiens
  source 1..2799: mol_type = genomic RNA
agagaggcccaggggacagccagggacaggcagacatgcagccagggctccagggcctggacaggggctgccaggccctgtgacaggaggaccccgagcccccggcccggggaggggccatggtgctgcctgtccaacatgtcagccgaggtgcggctgaggcggctccagcagctggtgttggacccgggcttcctggggctggagcccctgctcgaccttctcctgggcgtccaccaggagctgggcgcctccgaactggcccaggacaagtacgtggccgacttcttgcagtgggcggagcccatcgtggtgaggcttaaggaggtccgactgcagagggacgacttcgagattctgaaggtgatcggacgcggggcgttcagcgaggtagcggtagtgaagatgaagcagacgggccaggtgtatgccatgaagatcatgaacaagtgggacatgctgaagaggggcgaggtgtcgtgcttccgtgaggagagggacgtgttggtgaatggggaccggcggtggatcacgcagctgcacttcgccttccaggatgagaactacctgtacctggtcatggagtattacgtgggcggggacctgctgacactgctgagcaagtttggggagcggattccggccgagatggcgcgcttctacctggcggagattgtcatggccatagactcggtgcaccggcttggctacgtgcacagggacatcaaacccgacaacatcctgctggaccgctgtggccacatccgcctggccgacttcggctcttgcctcaagctgcgggcagatggaacggtgcggtcgctggtggctgtgggcaccccagactacctgtcccccgagatcctgcaggctgtgggcggtgggcctgggacaggcagctacgggcccgagtgtgactggtgggcgctgggtgtattcgcctatgaaatgttctatgggcagacgcccttctacgcggattccacggcggagacctatggcaagatcgtccactacaaggagcacctctctctgccgctggtggacgaaggggtccctgaggaggctcgagacttcattcagcggttgctgtgtcccccggagacacggctgggccggggtggagcaggcgacttccggacacatcccttcttctttggcctcgactgggatggtctccgggacagcgtgcccccctttacaccggatttcgaaggtgccaccgacacatgcaacttcgacttggtggaggacgggctcactgccatggtgagcgggggcggggagacactgtcggacattcgggaaggtgcgccgctaggggtccacctgccttttgtgggctactcctactcctgcatggccctcagggacagtgaggtcccaggccccacacccatggaactggaggccgagcagctgcttgagccacacgtgcaagcgcccagcctggagccctcggtgtccccacaggatgaaacagctgaagtggcagttccagcggctgtccctgcggcagaggctgaggccgaggtgacgctgcgggagctccaggaagccctggaggaggaggtgctcacccggcagagcctgagccgggagatggaggccatccgcacggacaaccagaacttcgccagtcaactacgcgaggcagaggctcggaaccgggacctagaggcacacgtccggcagttgcaggagcggatggagttgctgcaggcagagggagccacagctgtcacgggggtccccagtccccgggccacggatccaccttcccatctagatggccccccggccgtggctgtgggccagtgcccgctggtggggccaggccccatgcaccgccgccacctgctgctccctgccagggtccctaggcctggcctatcggaggcgctttccctgctcctgttcgccgttgttctgtctcgtgccgccgccctgggctgcattgggttggtggcccacgccggccaactcaccgcagtctggcgccgcccaggagccgcccgcgctccctgaaccctagaactgtcttcgactccggggccccgttggaagactgagtgcccggggcacggcacagaagccgcgcccaccgcctgccagttcacaaccgctccgagcgtgggtctccgcccagctccagtcctgtgatccgggcccgccccctagcggccggggagggaggggccgggtccgcggccggcgaacggggctcgaagggtccttgtagccgggaatgctgctgctgctgctgctgctgctgctgctgctgctgctgctgctgctgctgctgctgctggggggatcacagaccatttctttctttcggccaggctgaggccctgacgtggatgggcaaactgcaggcctgggaaggcagcaagccgggccgtccgtgttccatcctccacgcacccccacctatcgttggttcgcaaagtgcaaagctttcttgtgcatgacgccctgctctggggagcgtctggcgcgatctctgcctgcttactcgggaaatttgcttttgccaaacccgctttttcggggatcccgcgcccccctcctcacttgcgctgctctcggagccccagccggctccgcccgcttcggcggtttggatatttattgacctcgtcctccgactcgctgacaggctacaggacccccaacaaccccaatccacgttttggatgcactgagaccccgacattcctcggtatttattgtctgtccccacctaggacccccacccccgaccctcgcgaataaaaggccctccatctgcccaaa

SEQ ID NO: 3 - RNA, 19 nt, synthetic construct
  source 1..19: mol_type = other RNA
aggcttaaggaggtccgat

SEQ ID NO: 4 - RNA, 19 nt, synthetic construct
  source 1..19: mol_type = other RNA
ggcttaaggaggtccgact

SEQ ID NO: 5 - RNA, 19 nt, synthetic construct
  source 1..19: mol_type = other RNA
gcttaaggaggtccgactt

SEQ ID NO: 6 - RNA, 19 nt, synthetic construct
  source 1..19: mol_type = other RNA
aagtgggacatgctgaaga

SEQ ID NO: 7 - RNA, 19 nt, synthetic construct
  source 1..19: mol_type = other RNA
agtgggacatgctgaagat

SEQ ID NO: 8 - RNA, 19 nt, synthetic construct
  source 1..19: mol_type = other RNA
ggcgaggtgtcgtgcttct

SEQ ID NO: 9 - RNA, 19 nt, synthetic construct
  source 1..19: mol_type = other RNA
gccttccaggatgagaact

SEQ ID NO: 10 - RNA, 19 nt, synthetic construct
  source 1..19: mol_type = other RNA
ccttccaggatgagaacta

SEQ ID NO: 11 - RNA, 19 nt, synthetic construct
  source 1..19: mol_type = other RNA
cttccaggatgagaactat

SEQ ID NO: 12 - RNA, 19 nt, synthetic construct
  source 1..19: mol_type = other RNA
ccaggatgagaactaccta

SEQ ID NO: 13 - RNA, 19 nt, synthetic construct
  source 1..19: mol_type = other RNA
caggatgagaactacctgt

SEQ ID NO: 14 - RNA, 19 nt, synthetic construct
  source 1..19: mol_type = other RNA
aggatgagaactacctgta

SEQ ID NO: 15 - RNA, 19 nt, synthetic construct
  source 1..19: mol_type = other RNA
ggatgagaactacctgtat

SEQ ID NO: 16 - RNA, 19 nt, synthetic construct
  source 1..19: mol_type = other RNA
actacctgtacctggtcat

SEQ ID NO: 17 - RNA, 19 nt, synthetic construct
  source 1..19: mol_type = other RNA
ctacctgtacctggtcatt

SEQ ID NO: 18 - RNA, 19 nt, synthetic construct
  source 1..19: mol_type = other RNA
tacctgtacctggtcatgt

SEQ ID NO: 19 - RNA, 19 nt, synthetic construct
  source 1..19: mol_type = other RNA
acctgtacctggtcatgga

SEQ ID NO: 20 - RNA, 19 nt, synthetic construct
  source 1..19: mol_type = other RNA
gctgagcaagtttggggat

SEQ ID NO: 21 - RNA, 19 nt, synthetic construct
  source 1..19: mol_type = other RNA
gcaagtttggggagcggat

SEQ ID NO: 22 - RNA, 19 nt, synthetic construct
  source 1..19: mol_type = other RNA
gagattgtcatggccatat

SEQ ID NO: 23 - RNA, 19 nt, synthetic construct
  source 1..19: mol_type = other RNA
agattgtcatggccataga

SEQ ID NO: 24 - RNA, 19 nt, synthetic construct
  source 1..19: mol_type = other RNA
ggctacgtgcacagggaca

SEQ ID NO: 25 - RNA, 19 nt, synthetic construct
  source 1..19: mol_type = other RNA
gctacgtgcacagggacat

SEQ ID NO: 26 - RNA, 19 nt, synthetic construct
  source 1..19: mol_type = other RNA
ctacgtgcacagggacatt

SEQ ID NO: 27 - RNA, 19 nt, synthetic construct
  source 1..19: mol_type = other RNA
tacgtgcacagggacatca

SEQ ID NO: 28 - RNA, 19 nt, synthetic construct
  source 1..19: mol_type = other RNA
acgtgcacagggacatcaa

SEQ ID NO: 29 - RNA, 19 nt, synthetic construct
  source 1..19: mol_type = other RNA
cgtgcacagggacatcaaa

SEQ ID NO: 30 - RNA, 19 nt, synthetic construct
  source 1..19: mol_type = other RNA
gtgcacagggacatcaaat

SEQ ID NO: 31 - RNA, 19 nt, synthetic construct
  source 1..19: mol_type = other RNA
tgcacagggacatcaaact

SEQ ID NO: 32 - RNA, 19 nt, synthetic construct
  source 1..19: mol_type = other RNA
ggctcactgccatggtgat

SEQ ID NO: 33 - RNA, 19 nt, synthetic construct
  source 1..19: mol_type = other RNA
gctcactgccatggtgagt

SEQ ID NO: 34 - RNA, 19 nt, synthetic construct
  source 1..19: mol_type = other RNA
ctcactgccatggtgagct

SEQ ID NO: 35 - RNA, 19 nt, synthetic construct
  source 1..19: mol_type = other RNA
tcactgccatggtgagcgt

SEQ ID NO: 36 - RNA, 19 nt, synthetic construct
  source 1..19: mol_type = other RNA
ctcacccggcagagcctga

SEQ ID NO: 37 - RNA, 19 nt, synthetic construct
  source 1..19: mol_type = other RNA
tcacccggcagagcctgat

SEQ ID NO: 38 - RNA, 19 nt, synthetic construct
  source 1..19: mol_type = other RNA
cacggatccaccttcccat

SEQ ID NO: 39 - RNA, 19 nt, synthetic construct
  source 1..19: mol_type = other RNA
acggatccaccttcccatc

SEQ ID NO: 40 - RNA, 19 nt, synthetic construct
  source 1..19: mol_type = other RNA
cggatccaccttcccatct

SEQ ID NO: 41 - RNA, 19 nt, synthetic construct
  source 1..19: mol_type = other RNA
ggatccaccttcccatcta

SEQ ID NO: 42 - RNA, 19 nt, synthetic construct
  source 1..19: mol_type = other RNA
gatccaccttcccatctat

SEQ ID NO: 43 - RNA, 19 nt, synthetic construct
  source 1..19: mol_type = other RNA
atccaccttcccatctaga

SEQ ID NO: 44 - RNA, 19 nt, synthetic construct
  source 1..19: mol_type = other RNA
tccaccttcccatctagat

SEQ ID NO: 45 - RNA, 19 nt, synthetic construct
  source 1..19: mol_type = other RNA
ccaccttcccatctagatt

SEQ ID NO: 46 - RNA, 19 nt, synthetic construct
  source 1..19: mol_type = other RNA
acctgctgctccctgccat

SEQ ID NO: 47 - RNA, 19 nt, synthetic construct
  source 1..19: mol_type = other RNA
tccctaggcctggcctatt

SEQ ID NO: 48 - RNA, 19 nt, synthetic construct
  source 1..19: mol_type = other RNA
attcctcggtatttattgt

SEQ ID NO: 49 - RNA, 19 nt, synthetic construct
  source 1..19: mol_type = other RNA
ttcctcggtatttattgtt

SEQ ID NO: 50 - RNA, 19 nt, synthetic construct
  source 1..19: mol_type = other RNA
ctcggtatttattgtctgt

SEQ ID NO: 51 - RNA, 19 nt, synthetic construct
  source 1..19: mol_type = other RNA
tcggtatttattgtctgtt

SEQ ID NO: 52 - RNA, 19 nt, synthetic construct
  source 1..19: mol_type = other RNA
cggtatttattgtctgtct

SEQ ID NO: 53 - RNA, 19 nt, synthetic construct
  source 1..19: mol_type = other RNA
gcggagcccatcgtggtga

SEQ ID NO: 54 - RNA, 19 nt, synthetic construct
  source 1..19: mol_type = other RNA
cggagcccatcgtggtgat

SEQ ID NO: 55 - RNA, 19 nt, synthetic construct
  source 1..19: mol_type = other RNA
gcccatcgtggtgaggctt

SEQ ID NO: 56 - RNA, 19 nt, synthetic construct
  source 1..19: mol_type = other RNA
cccatcgtggtgaggctta

SEQ ID NO: 57 - RNA, 19 nt, synthetic construct
  source 1..19: mol_type = other RNA
ccatcgtggtgaggcttaa

SEQ ID NO: 58 - RNA, 19 nt, synthetic construct
  source 1..19: mol_type = other RNA
catcgtggtgaggcttaat

SEQ ID NO: 59 - RNA, 19 nt, synthetic construct
  source 1..19: mol_type = other RNA
cgtggtgaggcttaaggat

SEQ ID NO: 60 - RNA, 19 nt, synthetic construct
  source 1..19: mol_type = other RNA
ggtgaggcttaaggaggtt

SEQ ID NO: 61 - RNA, 19 nt, synthetic construct
  source 1..19: mol_type = other RNA
agggacgacttcgagattt

SEQ ID NO: 62 - RNA, 19 nt, synthetic construct
  source 1..19: mol_type = other RNA
ggacgacttcgagattctt

SEQ ID NO: 63 - RNA, 19 nt, synthetic construct
  source 1..19: mol_type = other RNA
cgacttcgagattctgaat

SEQ ID NO: 64 - RNA, 19 nt, synthetic construct
  source 1..19: mol_type = other RNA
cgagattctgaaggtgatt

SEQ ID NO: 65 - RNA, 19 nt, synthetic construct
  source 1..19: mol_type = other RNA
attctgaaggtgatcggat

SEQ ID NO: 66 - RNA, 19 nt, synthetic construct
  source 1..19: mol_type = other RNA
gatgaagcagacgggccat

SEQ ID NO: 67 - RNA, 19 nt, synthetic construct
  source 1..19: mol_type = other RNA
agcagacgggccaggtgta

SEQ ID NO: 68 - RNA, 19 nt, synthetic construct
  source 1..19: mol_type = other RNA
catgaagatcatgaacaat

SEQ ID NO: 69 - RNA, 19 nt, synthetic construct
  source 1..19: mol_type = other RNA
tgaagatcatgaacaagtt

SEQ ID NO: 70 - RNA, 19 nt, synthetic construct
  source 1..19: mol_type = other RNA
catgaacaagtgggacatt

SEQ ID NO: 71 - RNA, 19 nt, synthetic construct
  source 1..19: mol_type = other RNA
caagtgggacatgctgaat

SEQ ID NO: 72 - RNA, 19 nt, synthetic construct
  source 1..19: mol_type = other RNA
gaggtgtcgtgcttccgtt

SEQ ID NO: 73 - RNA, 19 nt, synthetic construct
  source 1..19: mol_type = other RNA
ggtgtcgtgcttccgtgat

SEQ ID NO: 74 - RNA, 19 nt, synthetic construct
  source 1..19: mol_type = other RNA
cgtgcttccgtgaggagat

SEQ ID NO: 75 - RNA, 19 nt, synthetic construct
  source 1..19: mol_type = other RNA
ccgtgaggagagggacgtt

SEQ ID NO: 76 - RNA, 19 nt, synthetic construct
  source 1..19: mol_type = other RNA
gtgaggagagggacgtgtt

SEQ ID NO: 77 - RNA, 19 nt, synthetic construct
  source 1..19: mol_type = other RNA
agagggacgtgttggtgaa

SEQ ID NO: 78 - RNA, 19 nt, synthetic construct
  source 1..19: mol_type = other RNA
gagggacgtgttggtgaat

SEQ ID NO: 79 - RNA, 19 nt, synthetic construct
  source 1..19: mol_type = other RNA
agggacgtgttggtgaatg

SEQ ID NO: 80 - RNA, 19 nt, synthetic construct
  source 1..19: mol_type = other RNA
ggtggatcacgcagctgca

SEQ ID NO: 81 - RNA, 19 nt, synthetic construct
  source 1..19: mol_type = other RNA
tcgccttccaggatgagaa

SEQ ID NO: 82 - RNA, 19 nt, synthetic construct
  source 1..19: mol_type = other RNA
cgccttccaggatgagaat

SEQ ID NO: 83 - RNA, 19 nt, synthetic construct
  source 1..19: mol_type = other RNA
cctgtacctggtcatggat

SEQ ID NO: 84 - RNA, 19 nt, synthetic construct
  source 1..19: mol_type = other RNA
ctgtacctggtcatggagt

SEQ ID NO: 85 - RNA, 19 nt, synthetic construct
  source 1..19: mol_type = other RNA
tgtacctggtcatggagta

SEQ ID NO: 86 - RNA, 19 nt, synthetic construct
  source 1..19: mol_type = other RNA
gtacctggtcatggagtat

SEQ ID NO: 87 - RNA, 19 nt, synthetic construct
  source 1..19: mol_type = other RNA
cctggtcatggagtattat

SEQ ID NO: 88 - RNA, 19 nt, synthetic construct
  source 1..19: mol_type = other RNA
ggtcatggagtattacgtt

SEQ ID NO: 89 - RNA, 19 nt, synthetic construct
  source 1..19: mol_type = other RNA
ggacctgctgacactgctt

SEQ ID NO: 90 - RNA, 19 nt, synthetic construct
  source 1..19: mol_type = other RNA
acctgctgacactgctgat

SEQ ID NO: 91 - RNA, 19 nt, synthetic construct
  source 1..19: mol_type = other RNA
tgctgacactgctgagcaa

SEQ ID NO: 92 - RNA, 19 nt, synthetic construct
  source 1..19: mol_type = other RNA
gctgacactgctgagcaat

SEQ ID NO: 93 - RNA, 19 nt, synthetic construct
  source 1..19: mol_type = other RNA
ctgacactgctgagcaagt

SEQ ID NO: 94 - RNA, 19 nt, synthetic construct
  source 1..19: mol_type = other RNA
tgacactgctgagcaagtt

SEQ ID NO: 95 - RNA, 19 nt, synthetic construct
  source 1..19: mol_type = other RNA
acactgctgagcaagttta

SEQ ID NO: 96 - RNA, 19 nt, synthetic construct
  source 1..19: mol_type = other RNA
gagcggattccggccgaga

SEQ ID NO: 97 - RNA, 19 nt, synthetic construct
  source 1..19: mol_type = other RNA
agcggattccggccgagat

SEQ ID NO: 98 - RNA, 19 nt, synthetic construct
  source 1..19: mol_type = other RNA
cggccgagatggcgcgctt

SEQ ID NO: 99 - RNA, 19 nt, synthetic construct
  source 1..19: mol_type = other RNA
ggccgagatggcgcgctta

SEQ ID NO: 100 - RNA, 19 nt, synthetic construct
  source 1..19: mol_type = other RNA
gccgagatggcgcgcttct

SEQ ID NO: 101 - RNA, 19 nt, synthetic construct
  source 1..19: mol_type = other RNA
ccgagatggcgcgcttcta

SEQ ID NO: 102 - RNA, 19 nt, synthetic construct
  source 1..19: mol_type = other RNA
cgagatggcgcgcttctat

SEQ ID NO: 103 - RNA, 19 nt, synthetic construct
  source 1..19: mol_type = other RNA
gcttctacctggcggagat

SEQ ID NO: 104 - RNA, 19 nt, synthetic construct
  source 1..19: mol_type = other RNA
cttctacctggcggagatt

SEQ ID NO: 105 - RNA, 19 nt, synthetic construct
  source 1..19: mol_type = other RNA
ttctacctggcggagatta

SEQ ID NO: 106 - RNA, 19 nt, synthetic construct
  source 1..19: mol_type = other RNA
tctacctggcggagattgt

SEQ ID NO: 107 - RNA, 19 nt, synthetic construct
  source 1..19: mol_type = other RNA
ctacctggcggagattgtt

SEQ ID NO: 108 - RNA, 19 nt, synthetic construct
  source 1..19: mol_type = other RNA
acctggcggagattgtcat

SEQ ID NO: 109 - RNA, 19 nt, synthetic construct
  source 1..19: mol_type = other RNA
cctggcggagattgtcatg

SEQ ID NO: 110 - RNA, 19 nt, synthetic construct
  source 1..19: mol_type = other RNA
cggagattgtcatggccat

SEQ ID NO: 111 - RNA, 19 nt, synthetic construct
  source 1..19: mol_type = other RNA
ggagattgtcatggccata

SEQ ID NO: 112 - RNA, 19 nt, synthetic construct
  source 1..19: mol_type = other RNA
gggacatcaaacccgacaa

SEQ ID NO: 113 - RNA, 19 nt, synthetic construct
  source 1..19: mol_type = other RNA
ggacatcaaacccgacaat

SEQ ID NO: 114 - RNA, 19 nt, synthetic construct
  source 1..19: mol_type = other RNA
gacatcaaacccgacaaca

SEQ ID NO: 115 - RNA, 19 nt, synthetic construct
  source 1..19: mol_type = other RNA
acatcaaacccgacaacat

SEQ ID NO: 116 - RNA, 19 nt, synthetic construct
  source 1..19: mol_type = other RNA
catcaaacccgacaacatt

SEQ ID NO: 117 - RNA, 19 nt, synthetic construct
  source 1..19: mol_type = other RNA
acccgacaacatcctgctt

SEQ ID NO: 118 - RNA, 19 nt, synthetic construct
  source 1..19: mol_type = other RNA
cgacaacatcctgctggat

SEQ ID NO: 119 - RNA, 19 nt, synthetic construct
  source 1..19: mol_type = other RNA
acatcctgctggaccgctt

SEQ ID NO: 120 - RNA, 19 nt, synthetic construct
  source 1..19: mol_type = other RNA
atcctgctggaccgctgtt

SEQ ID NO: 121 - RNA, 19 nt, synthetic construct
  source 1..19: mol_type = other RNA
tggaccgctgtggccacat

SEQ ID NO: 122 - RNA, 19 nt, synthetic construct
  source 1..19: mol_type = other RNA
ggaccgctgtggccacatt

SEQ ID NO: 123 - RNA, 19 nt, synthetic construct
  source 1..19: mol_type = other RNA
cacatccgcctggccgact

SEQ ID NO: 124 - RNA, 19 nt, synthetic construct
  source 1..19: mol_type = other RNA
acatccgcctggccgactt

SEQ ID NO: 125 - RNA, 19 nt, synthetic construct
  source 1..19: mol_type = other RNA
catccgcctggccgacttc

SEQ ID NO: 126 - RNA, 19 nt, synthetic construct
  source 1..19: mol_type = other RNA
cagatggaacggtgcggtt

SEQ ID NO: 127 - RNA, 19 nt, synthetic construct
  source 1..19: mol_type = other RNA
cgagatcctgcaggctgtt

SEQ ID NO: 128 - RNA, 19 nt, synthetic construct
  source 1..19: mol_type = other RNA
ggcctgggacaggcagcta

SEQ ID NO: 129 - RNA, 19 nt, synthetic construct
  source 1..19: mol_type = other RNA
gcctgggacaggcagctat

SEQ ID NO: 130 - RNA, 19 nt, synthetic construct
  source 1..19: mol_type = other RNA
ttcgcctatgaaatgttct

SEQ ID NO: 131 - RNA, 19 nt, synthetic construct
  source 1..19: mol_type = other RNA
tcgcctatgaaatgttcta

SEQ ID NO: 132 - RNA, 19 nt, synthetic construct
  source 1..19: mol_type = other RNA
gggcagacgcccttctact

SEQ ID NO: 133 - RNA, 19 nt, synthetic construct
  source 1..19: mol_type = other RNA
gacgcccttctacgcggat

SEQ ID NO: 134 - RNA, 19 nt, synthetic construct
  source 1..19: mol_type = other RNA
acgcccttctacgcggatt

SEQ ID NO: 135 - RNA, 19 nt, synthetic construct
  source 1..19: mol_type = other RNA
cgcccttctacgcggattt

SEQ ID NO: 136 - RNA, 19 nt, synthetic construct
  source 1..19: mol_type = other RNA
gcccttctacgcggattct

SEQ ID NO: 137 - RNA, 19 nt, synthetic construct
  source 1..19: mol_type = other RNA
ccttctacgcggattccat

SEQ ID NO: 138 - RNA, 19 nt, synthetic construct
  source 1..19: mol_type = other RNA
cggattccacggcggagat

SEQ ID NO: 139 - RNA, 19 nt, synthetic construct
  source 1..19: mol_type = other RNA
attccacggcggagaccta

SEQ ID NO: 140 - RNA, 19 nt, synthetic construct
  source 1..19: mol_type = other RNA
ggcaagatcgtccactaca

SEQ ID NO: 141 - RNA, 19 nt, synthetic construct
  source 1..19: mol_type = other RNA
gcaagatcgtccactacaa

SEQ ID NO: 142 - RNA, 19 nt, synthetic construct
  source 1..19: mol_type = other RNA
caagatcgtccactacaag

SEQ ID NO: 143 - RNA, 19 nt, synthetic construct
  source 1..19: mol_type = other RNA
gatcgtccactacaaggat

SEQ ID NO: 144 - RNA, 19 nt, synthetic construct
  source 1..19: mol_type = other RNA
cgtccactacaaggagcat

SEQ ID NO: 145 - RNA, 19 nt, synthetic construct
  source 1..19: mol_type = other RNA
ccactacaaggagcacctt

SEQ ID NO: 146 - RNA, 19 nt, synthetic construct
  source 1..19: mol_type = other RNA
ctacaaggagcacctctct

SEQ ID NO: 147 - RNA, 19 nt, synthetic construct
  source 1..19: mol_type = other RNA
tacaaggagcacctctctt

SEQ ID NO: 148 - RNA, 19 nt, synthetic construct
  source 1..19: mol_type = other RNA
caaggagcacctctctctt

SEQ ID NO: 149 - RNA, 19 nt, synthetic construct
  source 1..19: mol_type = other RNA
cttccggacacatccctta

SEQ ID NO: 150 - RNA, 19 nt, synthetic construct
  source 1..19: mol_type = other RNA
tccggacacatcccttctt

SEQ ID NO: 151 - RNA, 19 nt, synthetic construct
  source 1..19: mol_type = other RNA
ccggacacatcccttctta

SEQ ID NO: 152 - RNA, 19 nt, synthetic construct
  source 1..19: mol_type = other RNA
ggacacatcccttcttctt

SEQ ID NO: 153 - RNA, 19 nt, synthetic construct
  source 1..19: mol_type = other RNA
gacacatcccttcttcttt

SEQ ID NO: 154 - RNA, 19 nt, synthetic construct
  source 1..19: mol_type = other RNA
acacatcccttcttcttta

SEQ ID NO: 155 - RNA, 19 nt, synthetic construct
  source 1..19: mol_type = other RNA
cacatcccttcttctttgt

SEQ ID NO: 156 - RNA, 19 nt, synthetic construct
  source 1..19: mol_type = other RNA
tcccttcttctttggcctt

SEQ ID NO: 157 - RNA, 19 nt, synthetic construct
  source 1..19: mol_type = other RNA
cccttcttctttggcctct

SEQ ID NO: 158 - RNA, 19 nt, synthetic construct
  source 1..19: mol_type = other RNA
cttcttctttggcctcgat

SEQ ID NO: 159 - RNA, 19 nt, synthetic construct
  source 1..19: mol_type = other RNA
tttggcctcgactgggatt

SEQ ID NO: 160 - RNA, 19 nt, synthetic construct
  source 1..19: mol_type = other RNA
gcctcgactgggatggtct

SEQ ID NO: 161 - RNA, 19 nt, synthetic construct
  source 1..19: mol_type = other RNA
cctcgactgggatggtctt

SEQ ID NO: 162 - RNA, 19 nt, synthetic construct
  source 1..19: mol_type = other RNA
cctttacaccggatttcga

SEQ ID NO: 163 - RNA, 19 nt, synthetic construct
  source 1..19: mol_type = other RNA
ctttacaccggatttcgaa

SEQ ID NO: 164 - RNA, 19 nt, synthetic construct
  source 1..19: mol_type = other RNA
tttacaccggatttcgaat

SEQ ID NO: 165 - RNA, 19 nt, synthetic construct
  source 1..19: mol_type = other RNA
ttacaccggatttcgaagt

SEQ ID NO: 166 - RNA, 19 nt, synthetic construct
  source 1..19: mol_type = other RNA
tacaccggatttcgaaggt

SEQ ID NO: 167 - RNA, 19 nt, synthetic construct
  source 1..19: mol_type = other RNA
acaccggatttcgaaggtt

SEQ ID NO: 168 - RNA, 19 nt, synthetic construct
  source 1..19: mol_type = other RNA
cggatttcgaaggtgccat

SEQ ID NO: 169 - RNA, 19 nt, synthetic construct
  source 1..19: mol_type = other RNA
tcgaaggtgccaccgacat

SEQ ID NO: 170 - RNA, 19 nt, synthetic construct
  source 1..19: mol_type = other RNA
gaaggtgccaccgacacat

SEQ ID NO: 171 - RNA, 19 nt, synthetic construct
  source 1..19: mol_type = other RNA
aaggtgccaccgacacatt

SEQ ID NO: 172 - RNA, 19 nt, synthetic construct
  source 1..19: mol_type = other RNA
gtgccaccgacacatgcaa

SEQ ID NO: 173 - RNA, 19 nt, synthetic construct
  source 1..19: mol_type = other RNA
tgccaccgacacatgcaat

SEQ ID NO: 174 - RNA, 19 nt, synthetic construct
  source 1..19: mol_type = other RNA
ccaccgacacatgcaactt

SEQ ID NO: 175 - RNA, 19 nt, synthetic construct
  source 1..19: mol_type = other RNA
caccgacacatgcaacttt

SEQ ID NO: 176 - RNA, 19 nt, synthetic construct
  source 1..19: mol_type = other RNA
cgacacatgcaacttcgat

SEQ ID NO: 177 - RNA, 19 nt, synthetic construct
  source 1..19: mol_type = other RNA
gacacatgcaacttcgact

SEQ ID NO: 178 - RNA, 19 nt, synthetic construct
  source 1..19: mol_type = other RNA
acacatgcaacttcgactt

SEQ ID NO: 179 - RNA, 19 nt, synthetic construct
  source 1..19: mol_type = other RNA
cacatgcaacttcgactta

SEQ ID NO: 180 - RNA, 19 nt, synthetic construct
  source 1..19: mol_type = other RNA
acatgcaacttcgacttgt

SEQ ID NO: 181 - RNA, 19 nt, synthetic construct
  source 1..19: mol_type = other RNA
atgcaacttcgacttggtt

SEQ ID NO: 182 - RNA, 19 nt, synthetic construct
  source 1..19: mol_type = other RNA
caacttcgacttggtggat

SEQ ID NO: 183 - RNA, 19 nt, synthetic construct
  source 1..19: mol_type = other RNA
cttcgacttggtggaggac

SEQ ID NO: 184 - RNA, 19 nt, synthetic construct
  source 1..19: mol_type = other RNA
ctgtcggacattcgggaat

SEQ ID NO: 185 - RNA, 19 nt, synthetic construct
  source 1..19: mol_type = other RNA
cggacattcgggaaggtgc

SEQ ID NO: 186 - RNA, 19 nt, synthetic construct
  source 1..19: mol_type = other RNA
gctactcctactcctgcat

SEQ ID NO: 187 - RNA, 19 nt, synthetic construct
  source 1..19: mol_type = other RNA
ctactcctactcctgcatt

SEQ ID NO: 188 - RNA, 19 nt, synthetic construct
  source 1..19: mol_type = other RNA
cacacccatggaactggat

SEQ ID NO: 189 - RNA, 19 nt, synthetic construct
  source 1..19: mol_type = other RNA
catggaactggaggccgat

SEQ ID NO: 190 - RNA, 19 nt, synthetic construct
  source 1..19: mol_type = other RNA
gcagctgcttgagccacat

SEQ ID NO: 191 - RNA, 19 nt, synthetic construct
  source 1..19: mol_type = other RNA
gctgcttgagccacacgtt

SEQ ID NO: 192 - RNA, 19 nt, synthetic construct
  source 1..19: mol_type = other RNA
cttgagccacacgtgcaat

SEQ ID NO: 193 - RNA, 19 nt, synthetic construct
  source 1..19: mol_type = other RNA
ggatgaaacagctgaagtt

SEQ ID NO: 194 - RNA, 19 nt, synthetic construct
  source 1..19: mol_type = other RNA
gatgaaacagctgaagtgt

SEQ ID NO: 195 - RNA, 19 nt, synthetic construct
  source 1..19: mol_type = other RNA
gaaacagctgaagtggcat

SEQ ID NO: 196 - RNA, 19 nt, synthetic construct
  source 1..19: mol_type = other RNA
aacagctgaagtggcagtt

SEQ ID NO: 197 - RNA, 19 nt, synthetic construct
  source 1..19: mol_type = other RNA
gctgaagtggcagttccat

SEQ ID NO: 198 - RNA, 19 nt, synthetic construct
  source 1..19: mol_type = other RNA
agtcaactacgcgaggcat

SEQ ID NO: 199 - RNA, 19 nt, synthetic construct
  source 1..19: mol_type = other RNA
tcaactacgcgaggcagat

SEQ ID NO: 200 - RNA, 19 nt, synthetic construct
  source 1..19: mol_type = other RNA
ctacgcgaggcagaggctt

SEQ ID NO: 201 - RNA, 19 nt, synthetic construct
  source 1..19: mol_type = other RNA
cgaggcagaggctcggaac

SEQ ID NO: 202 - RNA, 19 nt, synthetic construct
  source 1..19: mol_type = other RNA
ggctcggaaccgggaccta

SEQ ID NO: 203 - RNA, 19 nt, synthetic construct
  source 1..19: mol_type = other RNA
gctcggaaccgggacctat

SEQ ID NO: 204 - RNA, 19 nt, synthetic construct
  source 1..19: mol_type = other RNA
tcggaaccgggacctagat

SEQ ID NO: 205 - RNA, 19 nt, synthetic construct
  source 1..19: mol_type = other RNA
gcagttgcaggagcggatt

SEQ ID NO: 206 - RNA, 19 nt, synthetic construct
  source 1..19: mol_type = other RNA
tgcaggagcggatggagtt

SEQ ID NO: 207 - RNA, 19 nt, synthetic construct
  source 1..19: mol_type = other RNA
gcaggagcggatggagtta

SEQ ID NO: 208 - RNA, 19 nt, synthetic construct
  source 1..19: mol_type = other RNA
ggagcggatggagttgctt

SEQ ID NO: 209 - RNA, 19 nt, synthetic construct
  source 1..19: mol_type = other RNA
taggcctggcctatcggat

SEQ ID NO: 210 - RNA, 19 nt, synthetic construct
  source 1..19: mol_type = other RNA
ggcctatcggaggcgcttt

SEQ ID NO: 211 - RNA, 19 nt, synthetic construct
  source 1..19: mol_type = other RNA
gcctatcggaggcgcttta

SEQ ID NO: 212 - RNA, 19 nt, synthetic construct
  source 1..19: mol_type = other RNA
cgctttccctgctcctgtt

SEQ ID NO: 213 - RNA, 19 nt, synthetic construct
  source 1..19: mol_type = other RNA
gctttccctgctcctgtta

SEQ ID NO: 214 - RNA, 19 nt, synthetic construct
  source 1..19: mol_type = other RNA
ctgctcctgttcgccgtta

SEQ ID NO: 215 - RNA, 19 nt, synthetic construct
  source 1..19: mol_type = other RNA
cggccaactcaccgcagtt

SEQ ID NO: 216 - RNA, 19 nt, synthetic construct
  source 1..19: mol_type = other RNA
gccaactcaccgcagtctt

SEQ ID NO: 217 - RNA, 19 nt, synthetic construct
  source 1..19: mol_type = other RNA
cgctccctgaaccctagaa

SEQ ID NO: 218 - RNA, 19 nt, synthetic construct
  source 1..19: mol_type = other RNA
gctccctgaaccctagaat

SEQ ID NO: 219 - RNA, 19 nt, synthetic construct
  source 1..19: mol_type = other RNA
cctgaaccctagaactgtc

SEQ ID NO: 220 - RNA, 19 nt, synthetic construct
  source 1..19: mol_type = other RNA
ctgaaccctagaactgtct

SEQ ID NO: 221 - RNA, 19 nt, synthetic construct
  source 1..19: mol_type = other RNA
tgaaccctagaactgtctt

SEQ ID NO: 222 - RNA, 19 nt, synthetic construct
  source 1..19: mol_type = other RNA
gaaccctagaactgtcttt

SEQ ID NO: 223 - RNA, 19 nt, synthetic construct
  source 1..19: mol_type = other RNA
aaccctagaactgtcttct

SEQ ID NO: 224 - RNA, 19 nt, synthetic construct
  source 1..19: mol_type = other RNA
accctagaactgtcttcga

SEQ ID NO: 225 - RNA, 19 nt, synthetic construct
  source 1..19: mol_type = other RNA
ccctagaactgtcttcgat

SEQ ID NO: 226 - RNA, 19 nt, synthetic construct
  source 1..19: mol_type = other RNA
cctagaactgtcttcgact

SEQ ID NO: 227 - RNA, 19 nt, synthetic construct
  source 1..19: mol_type = other RNA
ctagaactgtcttcgactt

SEQ ID NO: 228 - RNA, 19 nt, synthetic construct
  source 1..19: mol_type = other RNA
ccagctccagtcctgtgat

SEQ ID NO: 229 - RNA, 19 nt, synthetic construct
  source 1..19: mol_type = other RNA
cagctccagtcctgtgatt

SEQ ID NO: 230 - RNA, 19 nt, synthetic construct
  source 1..19: mol_type = other RNA
cttgtagccgggaatgctt

SEQ ID NO: 231 - RNA, 19 nt, synthetic construct
  source 1..19: mol_type = other RNA
tagccgggaatgctgctgt

SEQ ID NO: 232 - RNA, 19 nt, synthetic construct
  source 1..19: mol_type = other RNA
ttctttcggccaggctgaa

SEQ ID NO: 233 - RNA, 19 nt, synthetic construct
  source 1..19: mol_type = other RNA
ctgaggccctgacgtggat

SEQ ID NO: 234 - RNA, 19 nt, synthetic construct
  source 1..19: mol_type = other RNA
tgaggccctgacgtggatt

SEQ ID NO: 235 - RNA, 19 nt, synthetic construct
  source 1..19: mol_type = other RNA
ccctgacgtggatgggcaa

SEQ ID NO: 236 - RNA, 19 nt, synthetic construct
  source 1..19: mol_type = other RNA
cctgacgtggatgggcaaa

SEQ ID NO: 237 - RNA, 19 nt, synthetic construct
  source 1..19: mol_type = other RNA
ctgacgtggatgggcaaat

SEQ ID NO: 238 - RNA, 19 nt, synthetic construct
  source 1..19: mol_type = other RNA
tgtgcatgacgccctgctc

SEQ ID NO: 239 - RNA, 19 nt, synthetic construct
  source 1..19: mol_type = other RNA
gtgcatgacgccctgctct

SEQ ID NO: 240 - RNA, 19 nt, synthetic construct
  source 1..19: mol_type = other RNA
gcttactcgggaaatttga

SEQ ID NO: 241 - RNA, 19 nt, synthetic construct
  source 1..19: mol_type = other RNA
cttactcgggaaatttgct

SEQ ID NO: 242 - RNA, 19 nt, synthetic construct
  source 1..19: mol_type = other RNA
ttactcgggaaatttgctt

SEQ ID NO: 243 - RNA, 19 nt, synthetic construct
  source 1..19: mol_type = other RNA
tactcgggaaatttgcttt

SEQ ID NO: 244 - RNA, 19 nt, synthetic construct
  source 1..19: mol_type = other RNA
actcgggaaatttgctttt

SEQ ID NO: 245 - RNA, 19 nt, synthetic construct
  source 1..19: mol_type = other RNA
ctcgggaaatttgctttta

SEQ ID NO: 246 - RNA, 19 nt, synthetic construct
  source 1..19: mol_type = other RNA
tcgggaaatttgcttttgt

SEQ ID NO: 247 - RNA, 19 nt, synthetic construct
  source 1..19: mol_type = other RNA
ggaaatttgcttttgccaa

SEQ ID NO: 248 - RNA, 19 nt, synthetic construct
  source 1..19: mol_type = other RNA
gaaatttgcttttgccaaa

SEQ ID NO: 249 - RNA, 19 nt, synthetic construct
  source 1..19: mol_type = other RNA
aaatttgcttttgccaaat

SEQ ID NO: 250 - RNA, 19 nt, synthetic construct
  source 1..19: mol_type = other RNA
gcttttgccaaacccgctt

SEQ ID NO: 251 - RNA, 19 nt, synthetic construct
  source 1..19: mol_type = other RNA
gcttcggcggtttggatat

SEQ ID NO: 252 - RNA, 19 nt, synthetic construct
  source 1..19: mol_type = other RNA
cttcggcggtttggatatt

SEQ ID NO: 253 - RNA, 19 nt, synthetic construct
  source 1..19: mol_type = other RNA
ttcggcggtttggatattt

SEQ ID NO: 254 - RNA, 19 nt, synthetic construct
  source 1..19: mol_type = other RNA
tcggcggtttggatattta

SEQ ID NO: 255 - RNA, 19 nt, synthetic construct
  source 1..19: mol_type = other RNA
cggcggtttggatatttat

SEQ ID NO: 256 - RNA, 19 nt, synthetic construct
  source 1..19: mol_type = other RNA
ggcggtttggatatttatt

SEQ ID NO: 257 - RNA, 19 nt, synthetic construct
  source 1..19: mol_type = other RNA
gcggtttggatatttattt

SEQ ID NO: 258 - RNA, 19 nt, synthetic construct
  source 1..19: mol_type = other RNA
cggtttggatatttattga

SEQ ID NO: 259 - RNA, 19 nt, synthetic construct
  source 1..19: mol_type = other RNA
ggtttggatatttattgat

SEQ ID NO: 260 - RNA, 19 nt, synthetic construct
  source 1..19: mol_type = other RNA
gtttggatatttattgact

SEQ ID NO: 261 - RNA, 19 nt, synthetic construct
  source 1..19: mol_type = other RNA
tttggatatttattgacct

SEQ ID NO: 262 - RNA, 19 nt, synthetic construct
  source 1..19: mol_type = other RNA
ttggatatttattgacctt

SEQ ID NO: 263 - RNA, 19 nt, synthetic construct
  source 1..19: mol_type = other RNA
tggatatttattgacctct

SEQ ID NO: 264 - RNA, 19 nt, synthetic construct
  source 1..19: mol_type = other RNA
ggatatttattgacctcgt

SEQ ID NO: 265 - RNA, 19 nt, synthetic construct
  source 1..19: mol_type = other RNA
gatatttattgacctcgta

SEQ ID NO: 266 - RNA, 19 nt, synthetic construct
  source 1..19: mol_type = other RNA
atatttattgacctcgtct

SEQ ID NO: 267 - RNA, 19 nt, synthetic construct
  source 1..19: mol_type = other RNA
tttattgacctcgtcctca

SEQ ID NO: 268 - RNA, 19 nt, synthetic construct
  source 1..19: mol_type = other RNA
attgacctcgtcctccgat

SEQ ID NO: 269 - RNA, 19 nt, synthetic construct
  source 1..19: mol_type = other RNA
tcgtcctccgactcgctga

SEQ ID NO: 270 - RNA, 19 nt, synthetic construct
  source 1..19: mol_type = other RNA
tcctccgactcgctgacat

SEQ ID NO: 271 - RNA, 19 nt, synthetic construct
  source 1..19: mol_type = other RNA
cccaatccacgttttggat

SEQ ID NO: 272 - RNA, 19 nt, synthetic construct
  source 1..19: mol_type = other RNA
ccaatccacgttttggatt

SEQ ID NO: 273 - RNA, 19 nt, synthetic construct
  source 1..19: mol_type = other RNA
caatccacgttttggatga

SEQ ID NO: 274 - RNA, 19 nt, synthetic construct
  source 1..19: mol_type = other RNA
aatccacgttttggatgca

SEQ ID NO: 275 - RNA, 19 nt, synthetic construct
  source 1..19: mol_type = other RNA
atccacgttttggatgcat

SEQ ID NO: 276 - RNA, 19 nt, synthetic construct
  source 1..19: mol_type = other RNA
ccacgttttggatgcactt

SEQ ID NO: 277 - RNA, 19 nt, synthetic construct
  source 1..19: mol_type = other RNA
cacgttttggatgcactga

SEQ ID NO: 278 - RNA, 19 nt, synthetic construct
  source 1..19: mol_type = other RNA
acgttttggatgcactgat

SEQ ID NO: 279 - RNA, 19 nt, synthetic construct
  source 1..19: mol_type = other RNA
cgttttggatgcactgaga

SEQ ID NO: 280 - RNA, 19 nt, synthetic construct
  source 1..19: mol_type = other RNA
gttttggatgcactgagat

SEQ ID NO: 281 - RNA, 19 nt, synthetic construct
  source 1..19: mol_type = other RNA
ttttggatgcactgagact

SEQ ID NO: 282 - RNA, 19 nt, synthetic construct
  source 1..19: mol_type = other RNA
cctcggtatttattgtcta

SEQ ID NO: 283 - RNA, 19 nt, synthetic construct
  source 1..19: mol_type = other RNA
cccgaccctcgcgaataaa

SEQ ID NO: 284 - RNA, 19 nt, synthetic construct
  source 1..19: mol_type = other RNA
ccgaccctcgcgaataaaa

SEQ ID NO: 285 - RNA, 19 nt, synthetic construct
  source 1..19: mol_type = other RNA
cgaccctcgcgaataaaat

SEQ ID NO: 286 - RNA, 19 nt, synthetic construct
  source 1..19: mol_type = other RNA
gaccctcgcgaataaaagt

SEQ ID NO: 287 - RNA, 19 nt, synthetic construct
  source 1..19: mol_type = other RNA
accctcgcgaataaaaggt

SEQ ID NO: 288 - RNA, 19 nt, synthetic construct
  source 1..19: mol_type = other RNA
ccctcgcgaataaaaggct

SEQ ID NO: 289 - RNA, 19 nt, synthetic construct
  source 1..19: mol_type = other RNA
tcgcgaataaaaggcccta

SEQ ID NO: 290 - RNA, 19 nt, synthetic construct
  source 1..19: mol_type = other RNA
cgcgaataaaaggccctca

SEQ ID NO: 291 - RNA, 19 nt, synthetic construct
  source 1..19: mol_type = other RNA
gcgaataaaaggccctcca

SEQ ID NO: 292 - RNA, 19 nt, synthetic construct
  source 1..19: mol_type = other RNA
cgaataaaaggccctccat

SEQ ID NO: 293 - RNA, 19 nt, synthetic construct
  source 1..19: mol_type = other RNA
gaataaaaggccctccatt

SEQ ID NO: 294 - RNA, 21 nt, synthetic construct
  source 1..21: mol_type = other RNA
atcggacctccttaagcctca

SEQ ID NO: 295 - RNA, 21 nt, synthetic construct
  source 1..21: mol_type = other RNA
agtcggacctccttaagcctc

SEQ ID NO: 296 - RNA, 21 nt, synthetic construct
  source 1..21: mol_type = other RNA
aagtcggacctccttaagcct

SEQ ID NO: 297 - RNA, 21 nt, synthetic construct
  source 1..21: mol_type = other RNA
tcttcagcatgtcccacttgt

SEQ ID NO: 298 - RNA, 21 nt, synthetic construct
  source 1..21: mol_type = other RNA
atcttcagcatgtcccacttg

SEQ ID NO: 299 - RNA, 21 nt, synthetic construct
  source 1..21: mol_type = other RNA
agaagcacgacacctcgcccc

SEQ ID NO: 300 - RNA, 21 nt, synthetic construct
  source 1..21: mol_type = other RNA
agttctcatcctggaaggcga

SEQ ID NO: 301 - RNA, 21 nt, synthetic construct
  source 1..21: mol_type = other RNA
tagttctcatcctggaaggcg

SEQ ID NO: 302 - RNA, 21 nt, synthetic construct
  source 1..21: mol_type = other RNA
atagttctcatcctggaaggc

SEQ ID NO: 303 - RNA, 21 nt, synthetic construct
  source 1..21: mol_type = other RNA
taggtagttctcatcctggaa

SEQ ID NO: 304 - RNA, 21 nt, synthetic construct
  source 1..21: mol_type = other RNA
acaggtagttctcatcctgga

SEQ ID NO: 305 - RNA, 21 nt, synthetic construct
  source 1..21: mol_type = other RNA
tacaggtagttctcatcctgg

SEQ ID NO: 306 - RNA, 21 nt, synthetic construct
  source 1..21: mol_type = other RNA
atacaggtagttctcatcctg

SEQ ID NO: 307 - RNA, 21 nt, synthetic construct
  source 1..21: mol_type = other RNA
atgaccaggtacaggtagttc

SEQ ID NO: 308 - RNA, 21 nt, synthetic construct
  source 1..21: mol_type = other RNA
aatgaccaggtacaggtagtt

SEQ ID NO: 309 - RNA, 21 nt, synthetic construct
  source 1..21: mol_type = other RNA
acatgaccaggtacaggtagt

SEQ ID NO: 310 - RNA, 21 nt, synthetic construct
  source 1..21: mol_type = other RNA
tccatgaccaggtacaggtag

SEQ ID NO: 311 - RNA, 21 nt, synthetic construct
  source 1..21: mol_type = other RNA
atccccaaacttgctcagcag

SEQ ID NO: 312 - RNA, 21 nt, synthetic construct
  source 1..21: mol_type = other RNA
atccgctccccaaacttgctc

SEQ ID NO: 313 - RNA, 21 nt, synthetic construct
  source 1..21: mol_type = other RNA
atatggccatgacaatctccg

SEQ ID NO: 314 - RNA, 21 nt, synthetic construct
  source 1..21: mol_type = other RNA
tctatggccatgacaatctcc

SEQ ID NO: 315 - RNA, 21 nt, synthetic construct
  source 1..21: mol_type = other RNA
tgtccctgtgcacgtagccaa

SEQ ID NO: 316 - RNA, 21 nt, synthetic construct
  source 1..21: mol_type = other RNA
atgtccctgtgcacgtagcca

SEQ ID NO: 317 - RNA, 21 nt, synthetic construct
  source 1..21: mol_type = other RNA
aatgtccctgtgcacgtagcc

SEQ ID NO: 318 - RNA, 21 nt, synthetic construct
  source 1..21: mol_type = other RNA
tgatgtccctgtgcacgtagc

SEQ ID NO: 319 - RNA, 21 nt, synthetic construct
  source 1..21: mol_type = other RNA
ttgatgtccctgtgcacgtag

SEQ ID NO: 320 - RNA, 21 nt, synthetic construct
  source 1..21: mol_type = other RNA
tttgatgtccctgtgcacgta

SEQ ID NO: 321 - RNA, 21 nt, synthetic construct
  source 1..21: mol_type = other RNA
atttgatgtccctgtgcacgt

SEQ ID NO: 322 - RNA, 21 nt, synthetic construct
  source 1..21: mol_type = other RNA
agtttgatgtccctgtgcacg

SEQ ID NO: 323 - RNA, 21 nt, synthetic construct
  source 1..21: mol_type = other RNA
atcaccatggcagtgagcccg

SEQ ID NO: 324 - RNA, 21 nt, synthetic construct
  source 1..21: mol_type = other RNA
actcaccatggcagtgagccc

SEQ ID NO: 325 - RNA, 21 nt, synthetic construct
  source 1..21: mol_type = other RNA
agctcaccatggcagtgagcc

SEQ ID NO: 326 - RNA, 21 nt, synthetic construct
  source 1..21: mol_type = other RNA
acgctcaccatggcagtgagc

SEQ ID NO: 327 - RNA, 21 nt, synthetic construct
  source 1..21: mol_type = other RNA
tcaggctctgccgggtgagca

SEQ ID NO: 328 - RNA, 21 nt, synthetic construct
  source 1..21: mol_type = other RNA
atcaggctctgccgggtgagc

SEQ ID NO: 329 - RNA, 21 nt, synthetic construct
  source 1..21: mol_type = other RNA
atgggaaggtggatccgtggc

SEQ ID NO: 330 - RNA, 21 nt, synthetic construct
  source 1..21: mol_type = other RNA
gatgggaaggtggatccgtgg

SEQ ID NO: 331 - RNA, 21 nt, synthetic construct
  source 1..21: mol_type = other RNA
agatgggaaggtggatccgtg

SEQ ID NO: 332 - RNA, 21 nt, synthetic construct
  source 1..21: mol_type = other RNA
tagatgggaaggtggatccgt

SEQ ID NO: 333 - RNA, 21 nt, synthetic construct
  source 1..21: mol_type = other RNA
atagatgggaaggtggatccg

SEQ ID NO: 334 - RNA, 21 nt, synthetic construct
  source 1..21: mol_type = other RNA
tctagatgggaaggtggatcc

SEQ ID NO: 335 - RNA, 21 nt, synthetic construct
  source 1..21: mol_type = other RNA
atctagatgggaaggtggatc

SEQ ID NO: 336 - RNA, 21 nt, synthetic construct
  source 1..21: mol_type = other RNA
aatctagatgggaaggtggat

SEQ ID NO: 337 - RNA, 21 nt, synthetic construct
  source 1..21: mol_type = other RNA
atggcagggagcagcaggtgg

SEQ ID NO: 338 - RNA, 21 nt, synthetic construct
  source 1..21: mol_type = other RNA
aataggccaggcctagggacc

SEQ ID NO: 339 - RNA, 21 nt, synthetic construct
  source 1..21: mol_type = other RNA
acaataaataccgaggaatgt

SEQ ID NO: 340 - RNA, 21 nt, synthetic construct
  source 1..21: mol_type = other RNA
aacaataaataccgaggaatg

SEQ ID NO: 341 - RNA, 21 nt, synthetic construct
  source 1..21: mol_type = other RNA
acagacaataaataccgagga

SEQ ID NO: 342 - RNA, 21 nt, synthetic construct
  source 1..21: mol_type = other RNA
aacagacaataaataccgagg

SEQ ID NO: 343 - RNA, 21 nt, synthetic construct
  source 1..21: mol_type = other RNA
agacagacaataaataccgag

SEQ ID NO: 344 - RNA, 21 nt, synthetic construct
  source 1..21: mol_type = other RNA
tcaccacgatgggctccgctg

SEQ ID NO: 345 - RNA, 21 nt, synthetic construct
  source 1..21: mol_type = other RNA
atcaccacgatgggctccgct

SEQ ID NO: 346 - RNA, 21 nt, synthetic construct
  source 1..21: mol_type = other RNA
aagcctcaccacgatgggctc

SEQ ID NO: 347 - RNA, 21 nt, synthetic construct
  source 1..21: mol_type = other RNA
taagcctcaccacgatgggct

SEQ ID NO: 348 - RNA, 21 nt, synthetic construct
  source 1..21: mol_type = other RNA
ttaagcctcaccacgatgggc

SEQ ID NO: 349 - RNA, 21 nt, synthetic construct
  source 1..21: mol_type = other RNA
attaagcctcaccacgatggg

SEQ ID NO: 350 - RNA, 21 nt, synthetic construct
  source 1..21: mol_type = other RNA
atccttaagcctcaccacgat

SEQ ID NO: 351 - RNA, 21 nt, synthetic construct
  source 1..21: mol_type = other RNA
aacctccttaagcctcaccac

SEQ ID NO: 352 - RNA, 21 nt, synthetic construct
  source 1..21: mol_type = other RNA
aaatctcgaagtcgtccctct

SEQ ID NO: 353 - RNA, 21 nt, synthetic construct
  source 1..21: mol_type = other RNA
aagaatctcgaagtcgtccct

SEQ ID NO: 354 - RNA, 21 nt, synthetic construct
  source 1..21: mol_type = other RNA
attcagaatctcgaagtcgtc

SEQ ID NO: 355 - RNA, 21 nt, synthetic construct
  source 1..21: mol_type = other RNA
aatcaccttcagaatctcgaa

SEQ ID NO: 356 - RNA, 21 nt, synthetic construct
  source 1..21: mol_type = other RNA
atccgatcaccttcagaatct

SEQ ID NO: 357 - RNA, 21 nt, synthetic construct
  source 1..21: mol_type = other RNA
atggcccgtctgcttcatctt

SEQ ID NO: 358 - RNA, 21 nt, synthetic construct
  source 1..21: mol_type = other RNA
tacacctggcccgtctgcttc

SEQ ID NO: 359 - RNA, 21 nt, synthetic construct
  source 1..21: mol_type = other RNA
attgttcatgatcttcatggc

SEQ ID NO: 360 - RNA, 21 nt, synthetic construct
  source 1..21: mol_type = other RNA
aacttgttcatgatcttcatg

SEQ ID NO: 361 - RNA, 21 nt, synthetic construct
  source 1..21: mol_type = other RNA
aatgtcccacttgttcatgat

SEQ ID NO: 362 - RNA, 21 nt, synthetic construct
  source 1..21: mol_type = other RNA
attcagcatgtcccacttgtt

SEQ ID NO: 363 - RNA, 21 nt, synthetic construct
  source 1..21: mol_type = other RNA
aacggaagcacgacacctcgc

SEQ ID NO: 364 - RNA, 21 nt, synthetic construct
  source 1..21: mol_type = other RNA
atcacggaagcacgacacctc

SEQ ID NO: 365 - RNA, 21 nt, synthetic construct
  source 1..21: mol_type = other RNA
atctcctcacggaagcacgac

SEQ ID NO: 366 - RNA, 21 nt, synthetic construct
  source 1..21: mol_type = other RNA
aacgtccctctcctcacggaa

SEQ ID NO: 367 - RNA, 21 nt, synthetic construct
  source 1..21: mol_type = other RNA
aacacgtccctctcctcacgg

SEQ ID NO: 368 - RNA, 21 nt, synthetic construct
  source 1..21: mol_type = other RNA
ttcaccaacacgtccctctcc

SEQ ID NO: 369 - RNA, 21 nt, synthetic construct
  source 1..21: mol_type = other RNA
attcaccaacacgtccctctc

SEQ ID NO: 370 - RNA, 21 nt, synthetic construct
  source 1..21: mol_type = other RNA
cattcaccaacacgtccctct

SEQ ID NO: 371 - RNA, 21 nt, synthetic construct
  source 1..21: mol_type = other RNA
tgcagctgcgtgatccaccgc

SEQ ID NO: 372 - RNA, 21 nt, synthetic construct
  source 1..21: mol_type = other RNA
ttctcatcctggaaggcgaag

SEQ ID NO: 373 - RNA, 21 nt, synthetic construct
  source 1..21: mol_type = other RNA
attctcatcctggaaggcgaa

SEQ ID NO: 374 - RNA, 21 nt, synthetic construct
  source 1..21: mol_type = other RNA
atccatgaccaggtacaggta

SEQ ID NO: 375 - RNA, 21 nt, synthetic construct
  source 1..21: mol_type = other RNA
actccatgaccaggtacaggt

SEQ ID NO: 376 - RNA, 21 nt, synthetic construct
  source 1..21: mol_type = other RNA
tactccatgaccaggtacagg

SEQ ID NO: 377 - RNA, 21 nt, synthetic construct
  source 1..21: mol_type = other RNA
atactccatgaccaggtacag

SEQ ID NO: 378 - RNA, 21 nt, synthetic construct
  source 1..21: mol_type = other RNA
ataatactccatgaccaggta

SEQ ID NO: 379 - RNA, 21 nt, synthetic construct
  source 1..21: mol_type = other RNA
aacgtaatactccatgaccag

SEQ ID NO: 380 - RNA, 21 nt, synthetic construct
  source 1..21: mol_type = other RNA
aagcagtgtcagcaggtcccc

SEQ ID NO: 381 - RNA, 21 nt, synthetic construct
  source 1..21: mol_type = other RNA
atcagcagtgtcagcaggtcc

SEQ ID NO: 382 - RNA, 21 nt, synthetic construct
  source 1..21: mol_type = other RNA
ttgctcagcagtgtcagcagg

SEQ ID NO: 383 - RNA, 21 nt, synthetic construct
  source 1..21: mol_type = other RNA
attgctcagcagtgtcagcag

SEQ ID NO: 384 - RNA, 21 nt, synthetic construct
  source 1..21: mol_type = other RNA
acttgctcagcagtgtcagca

SEQ ID NO: 385 - RNA, 21 nt, synthetic construct
  source 1..21: mol_type = other RNA
aacttgctcagcagtgtcagc

SEQ ID NO: 386 - RNA, 21 nt, synthetic construct
  source 1..21: mol_type = other RNA
taaacttgctcagcagtgtca

SEQ ID NO: 387 - RNA, 21 nt, synthetic construct
  source 1..21: mol_type = other RNA
tctcggccggaatccgctccc

SEQ ID NO: 388 - RNA, 21 nt, synthetic construct
  source 1..21: mol_type = other RNA
atctcggccggaatccgctcc

SEQ ID NO: 389 - RNA, 21 nt, synthetic construct
  source 1..21: mol_type = other RNA
aagcgcgccatctcggccgga

SEQ ID NO: 390 - RNA, 21 nt, synthetic construct
  source 1..21: mol_type = other RNA
taagcgcgccatctcggccgg

SEQ ID NO: 391 - RNA, 21 nt, synthetic construct
  source 1..21: mol_type = other RNA
agaagcgcgccatctcggccg

SEQ ID NO: 392 - RNA, 21 nt, synthetic construct
  source 1..21: mol_type = other RNA
tagaagcgcgccatctcggcc

SEQ ID NO: 393 - RNA, 21 nt, synthetic construct
  source 1..21: mol_type = other RNA
atagaagcgcgccatctcggc

SEQ ID NO: 394 - RNA, 21 nt, synthetic construct
  source 1..21: mol_type = other RNA
atctccgccaggtagaagcgc

SEQ ID NO: 395 - RNA, 21 nt, synthetic construct
  source 1..21: mol_type = other RNA
aatctccgccaggtagaagcg

SEQ ID NO: 396 - RNA, 21 nt, synthetic construct
  source 1..21: mol_type = other RNA
taatctccgccaggtagaagc

SEQ ID NO: 397 - RNA, 21 nt, synthetic construct
  source 1..21: mol_type = other RNA
acaatctccgccaggtagaag

SEQ ID NO: 398 - RNA, 21 nt, synthetic construct
  source 1..21: mol_type = other RNA
aacaatctccgccaggtagaa

SEQ ID NO: 399 - RNA, 21 nt, synthetic construct
  source 1..21: mol_type = other RNA
atgacaatctccgccaggtag

SEQ ID NO: 400 - RNA, 21 nt, synthetic construct
  source 1..21: mol_type = other RNA
catgacaatctccgccaggta

SEQ ID NO: 401 - RNA, 21 nt, synthetic construct
  source 1..21: mol_type = other RNA
atggccatgacaatctccgcc

SEQ ID NO: 402 - RNA, 21 nt, synthetic construct
  source 1..21: mol_type = other RNA
tatggccatgacaatctccgc

SEQ ID NO: 403 - RNA, 21 nt, synthetic construct
  source 1..21: mol_type = other RNA
ttgtcgggtttgatgtccctg

SEQ ID NO: 404 - RNA, 21 nt, synthetic construct
  source 1..21: mol_type = other RNA
attgtcgggtttgatgtccct

SEQ ID NO: 405 - RNA, 21 nt, synthetic construct
  source 1..21: mol_type = other RNA
tgttgtcgggtttgatgtccc

SEQ ID NO: 406 - RNA, 21 nt, synthetic construct
  source 1..21: mol_type = other RNA
atgttgtcgggtttgatgtcc

SEQ ID NO: 407 - RNA, 21 nt, synthetic construct
  source 1..21: mol_type = other RNA
aatgttgtcgggtttgatgtc

SEQ ID NO: 408 - RNA, 21 nt, synthetic construct
  source 1..21: mol_type = other RNA
aagcaggatgttgtcgggttt

SEQ ID NO: 409 - RNA, 21 nt, synthetic construct
  source 1..21: mol_type = other RNA
atccagcaggatgttgtcggg

SEQ ID NO: 410 - RNA, 21 nt, synthetic construct
  source 1..21: mol_type = other RNA
aagcggtccagcaggatgttg

SEQ ID NO: 411 - RNA, 21 nt, synthetic construct
  source 1..21: mol_type = other RNA
aacagcggtccagcaggatgt

SEQ ID NO: 412 - RNA, 21 nt, synthetic construct
  source 1..21: mol_type = other RNA
atgtggccacagcggtccagc

SEQ ID NO: 413 - RNA, 21 nt, synthetic construct
  source 1..21: mol_type = other RNA
aatgtggccacagcggtccag

SEQ ID NO: 414 - RNA, 21 nt, synthetic construct
  source 1..21: mol_type = other RNA
agtcggccaggcggatgtggc

SEQ ID NO: 415 - RNA, 21 nt, synthetic construct
  source 1..21: mol_type = other RNA
aagtcggccaggcggatgtgg

SEQ ID NO: 416 - RNA, 21 nt, synthetic construct
  source 1..21: mol_type = other RNA
gaagtcggccaggcggatgtg

SEQ ID NO: 417 - RNA, 21 nt, synthetic construct
  source 1..21: mol_type = other RNA
aaccgcaccgttccatctgcc

SEQ ID NO: 418 - RNA, 21 nt, synthetic construct
  source 1..21: mol_type = other RNA
aacagcctgcaggatctcggg

SEQ ID NO: 419 - RNA, 21 nt, synthetic construct
  source 1..21: mol_type = other RNA
tagctgcctgtcccaggccca

SEQ ID NO: 420 - RNA, 21 nt, synthetic construct
  source 1..21: mol_type = other RNA
atagctgcctgtcccaggccc

SEQ ID NO: 421 - RNA, 21 nt, synthetic construct
  source 1..21: mol_type = other RNA
agaacatttcataggcgaata

SEQ ID NO: 422 - RNA, 21 nt, synthetic construct
  source 1..21: mol_type = other RNA
tagaacatttcataggcgaat

SEQ ID NO: 423 - RNA, 21 nt, synthetic construct
  source 1..21: mol_type = other RNA
agtagaagggcgtctgcccat

SEQ ID NO: 424 - RNA, 21 nt, synthetic construct
  source 1..21: mol_type = other RNA
atccgcgtagaagggcgtctg

SEQ ID NO: 425 - RNA, 21 nt, synthetic construct
  source 1..21: mol_type = other RNA
atccgcgtagaagggcgtctg

SEQ ID NO: 426 - RNA, 21 nt, synthetic construct
  source 1..21: mol_type = other RNA
aaatccgcgtagaagggcgtc

SEQ ID NO: 427 - RNA, 21 nt, synthetic construct
  source 1..21: mol_type = other RNA
agaatccgcgtagaagggcgt

SEQ ID NO: 428 - RNA, 21 nt, synthetic construct
  source 1..21: mol_type = other RNA
atggaatccgcgtagaagggc

SEQ ID NO: 429 - RNA, 21 nt, synthetic construct
  source 1..21: mol_type = other RNA
atctccgccgtggaatccgcg

SEQ ID NO: 430 - RNA, 21 nt, synthetic construct
  source 1..21: mol_type = other RNA
taggtctccgccgtggaatcc

SEQ ID NO: 431 - RNA, 21 nt, synthetic construct
  source 1..21: mol_type = other RNA
tgtagtggacgatcttgccat

SEQ ID NO: 432 - RNA, 21 nt, synthetic construct
  source 1..21: mol_type = other RNA
ttgtagtggacgatcttgcca

SEQ ID NO: 433 - RNA, 21 nt, synthetic construct
  source 1..21: mol_type = other RNA
cttgtagtggacgatcttgcc

SEQ ID NO: 434 - RNA, 21 nt, synthetic construct
  source 1..21: mol_type = other RNA
atccttgtagtggacgatctt

SEQ ID NO: 435 - RNA, 21 nt, synthetic construct
  source 1..21: mol_type = other RNA
atgctccttgtagtggacgat

SEQ ID NO: 436 - RNA, 21 nt, synthetic construct
  source 1..21: mol_type = other RNA
aaggtgctccttgtagtggac

SEQ ID NO: 437 - RNA, 21 nt, synthetic construct
  source 1..21: mol_type = other RNA
agagaggtgctccttgtagtg

SEQ ID NO: 438 - RNA, 21 nt, synthetic construct
  source 1..21: mol_type = other RNA
aagagaggtgctccttgtagt

SEQ ID NO: 439 - RNA, 21 nt, synthetic construct
  source 1..21: mol_type = other RNA
aagagagaggtgctccttgta

SEQ ID NO: 440 - RNA, 21 nt, synthetic construct
  source 1..21: mol_type = other RNA
taagggatgtgtccggaagtc

SEQ ID NO: 441 - RNA, 21 nt, synthetic construct
  source 1..21: mol_type = other RNA
aagaagggatgtgtccggaag

SEQ ID NO: 442 - RNA, 21 nt, synthetic construct
  source 1..21: mol_type = other RNA
taagaagggatgtgtccggaa

SEQ ID NO: 443 - RNA, 21 nt, synthetic construct
  source 1..21: mol_type = other RNA
aagaagaagggatgtgtccgg

SEQ ID NO: 444 - RNA, 21 nt, synthetic construct
  source 1..21: mol_type = other RNA
aaagaagaagggatgtgtccg

SEQ ID NO: 445 - RNA, 21 nt, synthetic construct
  source 1..21: mol_type = other RNA
taaagaagaagggatgtgtcc

SEQ ID NO: 446 - RNA, 21 nt, synthetic construct
  source 1..21: mol_type = other RNA
acaaagaagaagggatgtgtc

SEQ ID NO: 447 - RNA, 21 nt, synthetic construct
  source 1..21: mol_type = other RNA
aaggccaaagaagaagggatg

SEQ ID NO: 448 - RNA, 21 nt, synthetic construct
  source 1..21: mol_type = other RNA
agaggccaaagaagaagggat

SEQ ID NO: 449 - RNA, 21 nt, synthetic construct
  source 1..21: mol_type = other RNA
atcgaggccaaagaagaaggg

SEQ ID NO: 450 - RNA, 21 nt, synthetic construct
  source 1..21: mol_type = other RNA
aatcccagtcgaggccaaaga

SEQ ID NO: 451 - RNA, 21 nt, synthetic construct
  source 1..21: mol_type = other RNA
agaccatcccagtcgaggcca

SEQ ID NO: 452 - RNA, 21 nt, synthetic construct
  source 1..21: mol_type = other RNA
aagaccatcccagtcgaggcc

SEQ ID NO: 453 - RNA, 21 nt, synthetic construct
  source 1..21: mol_type = other RNA
tcgaaatccggtgtaaagggt

SEQ ID NO: 454 - RNA, 21 nt, synthetic construct
  source 1..21: mol_type = other RNA
ttcgaaatccggtgtaaaggg

SEQ ID NO: 455 - RNA, 21 nt, synthetic construct
  source 1..21: mol_type = other RNA
attcgaaatccggtgtaaagg

SEQ ID NO: 456 - RNA, 21 nt, synthetic construct
  source 1..21: mol_type = other RNA
acttcgaaatccggtgtaaag

SEQ ID NO: 457 - RNA, 21 nt, synthetic construct
  source 1..21: mol_type = other RNA
accttcgaaatccggtgtaaa

SEQ ID NO: 458 - RNA, 21 nt, synthetic construct
  source 1..21: mol_type = other RNA
aaccttcgaaatccggtgtaa

SEQ ID NO: 459 - RNA, 21 nt, synthetic construct
  source 1..21: mol_type = other RNA
atggcaccttcgaaatccggt

SEQ ID NO: 460 - RNA, 21 nt, synthetic construct
  source 1..21: mol_type = other RNA
atgtcggtggcaccttcgaaa

SEQ ID NO: 461 - RNA, 21 nt, synthetic construct
  source 1..21: mol_type = other RNA
atgtgtcggtggcaccttcga

SEQ ID NO: 462 - RNA, 21 nt, synthetic construct
  source 1..21: mol_type = other RNA
aatgtgtcggtggcaccttcg

SEQ ID NO: 463 - RNA, 21 nt, synthetic construct
  source 1..21: mol_type = other RNA
ttgcatgtgtcggtggcacct

SEQ ID NO: 464 - RNA, 21 nt, synthetic construct
  source 1..21: mol_type = other RNA
attgcatgtgtcggtggcacc

SEQ ID NO: 465 - RNA, 21 nt, synthetic construct
  source 1..21: mol_type = other RNA
aagttgcatgtgtcggtggca

SEQ ID NO: 466 - RNA, 21 nt, synthetic construct
  source 1..21: mol_type = other RNA
aaagttgcatgtgtcggtggc

SEQ ID NO: 467 - RNA, 21 nt, synthetic construct
  source 1..21: mol_type = other RNA
atcgaagttgcatgtgtcggt

SEQ ID NO: 468 - RNA, 21 nt, synthetic construct
  source 1..21: mol_type = other RNA
agtcgaagttgcatgtgtcgg

SEQ ID NO: 469 - RNA, 21 nt, synthetic construct
  source 1..21: mol_type = other RNA
aagtcgaagttgcatgtgtcg

SEQ ID NO: 470 - RNA, 21 nt, synthetic construct
  source 1..21: mol_type = other RNA
taagtcgaagttgcatgtgtc

SEQ ID NO: 471 - RNA, 21 nt, synthetic construct
  source 1..21: mol_type = other RNA
acaagtcgaagttgcatgtgt

SEQ ID NO: 472 - RNA, 21 nt, synthetic construct
  source 1..21: mol_type = other RNA
aaccaagtcgaagttgcatgt

SEQ ID NO: 473 - RNA, 21 nt, synthetic construct
  source 1..21: mol_type = other RNA
atccaccaagtcgaagttgca

SEQ ID NO: 474 - RNA, 21 nt, synthetic construct
  source 1..21: mol_type = other RNA
gtcctccaccaagtcgaagtt

SEQ ID NO: 475 - RNA, 21 nt, synthetic construct
  source 1..21: mol_type = other RNA
attcccgaatgtccgacagtg

SEQ ID NO: 476 - RNA, 21 nt, synthetic construct
  source 1..21: mol_type = other RNA
gcaccttcccgaatgtccgac

SEQ ID NO: 477 - RNA, 21 nt, synthetic construct
  source 1..21: mol_type = other RNA
atgcaggagtaggagtagccc

SEQ ID NO: 478 - RNA, 21 nt, synthetic construct
  source 1..21: mol_type = other RNA
aatgcaggagtaggagtagcc

SEQ ID NO: 479 - RNA, 21 nt, synthetic construct
  source 1..21: mol_type = other RNA
atccagttccatgggtgtggg

SEQ ID NO: 480 - RNA, 21 nt, synthetic construct
  source 1..21: mol_type = other RNA
atcggcctccagttccatggg

SEQ ID NO: 481 - RNA, 21 nt, synthetic construct
  source 1..21: mol_type = other RNA
atgtggctcaagcagctgctc

SEQ ID NO: 482 - RNA, 21 nt, synthetic construct
  source 1..21: mol_type = other RNA
aacgtgtggctcaagcagctg

SEQ ID NO: 483 - RNA, 21 nt, synthetic construct
  source 1..21: mol_type = other RNA
attgcacgtgtggctcaagca

SEQ ID NO: 484 - RNA, 21 nt, synthetic construct
  source 1..21: mol_type = other RNA
aacttcagctgtttcatcctg

SEQ ID NO: 485 - RNA, 21 nt, synthetic construct
  source 1..21: mol_type = other RNA
acacttcagctgtttcatcct

SEQ ID NO: 486 - RNA, 21 nt, synthetic construct
  source 1..21: mol_type = other RNA
atgccacttcagctgtttcat

SEQ ID NO: 487 - RNA, 21 nt, synthetic construct
  source 1..21: mol_type = other RNA
aactgccacttcagctgtttc

SEQ ID NO: 488 - RNA, 21 nt, synthetic construct
  source 1..21: mol_type = other RNA
atggaactgccacttcagctg

SEQ ID NO: 489 - RNA, 21 nt, synthetic construct
  source 1..21: mol_type = other RNA
atgcctcgcgtagttgactgg

SEQ ID NO: 490 - RNA, 21 nt, synthetic construct
  source 1..21: mol_type = other RNA
atctgcctcgcgtagttgact

SEQ ID NO: 491 - RNA, 21 nt, synthetic construct
  source 1..21: mol_type = other RNA
aagcctctgcctcgcgtagtt

SEQ ID NO: 492 - RNA, 21 nt, synthetic construct
  source 1..21: mol_type = other RNA
gttccgagcctctgcctcgcg

SEQ ID NO: 493 - RNA, 21 nt, synthetic construct
  source 1..21: mol_type = other RNA
taggtcccggttccgagcctc

SEQ ID NO: 494 - RNA, 21 nt, synthetic construct
  source 1..21: mol_type = other RNA
ataggtcccggttccgagcct

SEQ ID NO: 495 - RNA, 21 nt, synthetic construct
  source 1..21: mol_type = other RNA
atctaggtcccggttccgagc

SEQ ID NO: 496 - RNA, 21 nt, synthetic construct
  source 1..21: mol_type = other RNA
aatccgctcctgcaactgccg

SEQ ID NO: 497 - RNA, 21 nt, synthetic construct
  source 1..21: mol_type = other RNA
aactccatccgctcctgcaac

SEQ ID NO: 498 - RNA, 21 nt, synthetic construct
  source 1..21: mol_type = other RNA
taactccatccgctcctgcaa

SEQ ID NO: 499 - RNA, 21 nt, synthetic construct
  source 1..21: mol_type = other RNA
aagcaactccatccgctcctg

SEQ ID NO: 500 - RNA, 21 nt, synthetic construct
  source 1..21: mol_type = other RNA
atccgataggccaggcctagg

SEQ ID NO: 501 - RNA, 21 nt, synthetic construct
  source 1..21: mol_type = other RNA
aaagcgcctccgataggccag

SEQ ID NO: 502 - RNA, 21 nt, synthetic construct
  source 1..21: mol_type = other RNA
taaagcgcctccgataggcca

SEQ ID NO: 503 - RNA, 21 nt, synthetic construct
  source 1..21: mol_type = other RNA
aacaggagcagggaaagcgcc

SEQ ID NO: 504 - RNA, 21 nt, synthetic construct
  source 1..21: mol_type = other RNA
taacaggagcagggaaagcgc

SEQ ID NO: 505 - RNA, 21 nt, synthetic construct
  source 1..21: mol_type = other RNA
taacggcgaacaggagcaggg

SEQ ID NO: 506 - RNA, 21 nt, synthetic construct
  source 1..21: mol_type = other RNA
aactgcggtgagttggccggc

SEQ ID NO: 507 - RNA, 21 nt, synthetic construct
  source 1..21: mol_type = other RNA
aagactgcggtgagttggccg

SEQ ID NO: 508 - RNA, 21 nt, synthetic construct
  source 1..21: mol_type = other RNA
ttctagggttcagggagcgcg

SEQ ID NO: 509 - RNA, 21 nt, synthetic construct
  source 1..21: mol_type = other RNA
attctagggttcagggagcgc

SEQ ID NO: 510 - RNA, 21 nt, synthetic construct
  source 1..21: mol_type = other RNA
gacagttctagggttcaggga

SEQ ID NO: 511 - RNA, 21 nt, synthetic construct
  source 1..21: mol_type = other RNA
agacagttctagggttcaggg

SEQ ID NO: 512 - RNA, 21 nt, synthetic construct
  source 1..21: mol_type = other RNA
aagacagttctagggttcagg

SEQ ID NO: 513 - RNA, 21 nt, synthetic construct
  source 1..21: mol_type = other RNA
aaagacagttctagggttcag

SEQ ID NO: 514 - RNA, 21 nt, synthetic construct
  source 1..21: mol_type = other RNA
agaagacagttctagggttca

SEQ ID NO: 515 - RNA, 21 nt, synthetic construct
  source 1..21: mol_type = other RNA
tcgaagacagttctagggttc

SEQ ID NO: 516 - RNA, 21 nt, synthetic construct
  source 1..21: mol_type = other RNA
atcgaagacagttctagggtt

SEQ ID NO: 517 - RNA, 21 nt, synthetic construct
  source 1..21: mol_type = other RNA
agtcgaagacagttctagggt

SEQ ID NO: 518 - RNA, 21 nt, synthetic construct
  source 1..21: mol_type = other RNA
aagtcgaagacagttctaggg

SEQ ID NO: 519 - RNA, 21 nt, synthetic construct
  source 1..21: mol_type = other RNA
atcacaggactggagctgggc

SEQ ID NO: 520 - RNA, 21 nt, synthetic construct
  source 1..21: mol_type = other RNA
aatcacaggactggagctggg

SEQ ID NO: 521 - RNA, 21 nt, synthetic construct
  source 1..21: mol_type = other RNA
aagcattcccggctacaagga

SEQ ID NO: 522 - RNA, 21 nt, synthetic construct
  source 1..21: mol_type = other RNA
acagcagcattcccggctaca

SEQ ID NO: 523 - RNA, 21 nt, synthetic construct
  source 1..21: mol_type = other RNA
ttcagcctggccgaaagaaag

SEQ ID NO: 524 - RNA, 21 nt, synthetic construct
  source 1..21: mol_type = other RNA
atccacgtcagggcctcagcc

SEQ ID NO: 525 - RNA, 21 nt, synthetic construct
  source 1..21: mol_type = other RNA
aatccacgtcagggcctcagc

SEQ ID NO: 526 - RNA, 21 nt, synthetic construct
  source 1..21: mol_type = other RNA
ttgcccatccacgtcagggcc

SEQ ID NO: 527 - RNA, 21 nt, synthetic construct
  source 1..21: mol_type = other RNA
tttgcccatccacgtcagggc

SEQ ID NO: 528 - RNA, 21 nt, synthetic construct
  source 1..21: mol_type = other RNA
atttgcccatccacgtcaggg

SEQ ID NO: 529 - RNA, 21 nt, synthetic construct
  source 1..21: mol_type = other RNA
gagcagggcgtcatgcacaag

SEQ ID NO: 530 - RNA, 21 nt, synthetic construct
  source 1..21: mol_type = other RNA
agagcagggcgtcatgcacaa

SEQ ID NO: 531 - RNA, 21 nt, synthetic construct
  source 1..21: mol_type = other RNA
tcaaatttcccgagtaagcag

SEQ ID NO: 532 - RNA, 21 nt, synthetic construct
  source 1..21: mol_type = other RNA
agcaaatttcccgagtaagca

SEQ ID NO: 533 - RNA, 21 nt, synthetic construct
  source 1..21: mol_type = other RNA
aagcaaatttcccgagtaagc

SEQ ID NO: 534 - RNA, 21 nt, synthetic construct
  source 1..21: mol_type = other RNA
aaagcaaatttcccgagtaag

SEQ ID NO: 535 - RNA, 21 nt, synthetic construct
  source 1..21: mol_type = other RNA
aaaagcaaatttcccgagtaa

SEQ ID NO: 536 - RNA, 21 nt, synthetic construct
  source 1..21: mol_type = other RNA
taaaagcaaatttcccgagta

SEQ ID NO: 537 - RNA, 21 nt, synthetic construct
  source 1..21: mol_type = other RNA
tcaaaagcaaatttcccgagt

SEQ ID NO: 538 - RNA, 21 nt, synthetic construct
  source 1..21: mol_type = other RNA
ttggcaaaagcaaatttcccg

SEQ ID NO: 539 - RNA, 21 nt, synthetic construct
  source 1..21: mol_type = other RNA
tttggcaaaagcaaatttccc

SEQ ID NO: 540 - RNA, 21 nt, synthetic construct
  source 1..21: mol_type = other RNA
atttggcaaaagcaaatttcc

SEQ ID NO: 541 - RNA, 21 nt, synthetic construct
  source 1..21: mol_type = other RNA
aagcgggtttggcaaaagcaa

SEQ ID NO: 542 - RNA, 21 nt, synthetic construct
  source 1..21: mol_type = other RNA
atatccaaaccgccgaagcgg

SEQ ID NO: 543 - RNA, 21 nt, synthetic construct
  source 1..21: mol_type = other RNA
aatatccaaaccgccgaagcg

SEQ ID NO: 544 - RNA, 21 nt, synthetic construct
  source 1..21: mol_type = other RNA
aaatatccaaaccgccgaagc

SEQ ID NO: 545 - RNA, 21 nt, synthetic construct
  source 1..21: mol_type = other RNA
taaatatccaaaccgccgaag

SEQ ID NO: 546 - RNA, 21 nt, synthetic construct
  source 1..21: mol_type = other RNA
ataaatatccaaaccgccgaa

SEQ ID NO: 547 - RNA, 21 nt, synthetic construct
  source 1..21: mol_type = other RNA
aataaatatccaaaccgccga

SEQ ID NO: 548 - RNA, 21 nt, synthetic construct
  source 1..21: mol_type = other RNA
aaataaatatccaaaccgccg

SEQ ID NO: 549 - RNA, 21 nt, synthetic construct
  source 1..21: mol_type = other RNA
tcaataaatatccaaaccgcc

SEQ ID NO: 550 - RNA, 21 nt, synthetic construct
  source 1..21: mol_type = other RNA
atcaataaatatccaaaccgc

SEQ ID NO: 551 - RNA, 21 nt, synthetic construct
  source 1..21: mol_type = other RNA
agtcaataaatatccaaaccg

SEQ ID NO: 552 - RNA, 21 nt, synthetic construct
  source 1..21: mol_type = other RNA
aggtcaataaatatccaaacc

SEQ ID NO: 553 - RNA, 21 nt, synthetic construct
  source 1..21: mol_type = other RNA
aaggtcaataaatatccaaac

SEQ ID NO: 554 - RNA, 21 nt, synthetic construct
  source 1..21: mol_type = other RNA
agaggtcaataaatatccaaa

SEQ ID NO: 555 - RNA, 21 nt, synthetic construct
  source 1..21: mol_type = other RNA
acgaggtcaataaatatccaa

SEQ ID NO: 556 - RNA, 21 nt, synthetic construct
  source 1..21: mol_type = other RNA
tacgaggtcaataaatatcca

SEQ ID NO: 557 - RNA, 21 nt, synthetic construct
  source 1..21: mol_type = other RNA
agacgaggtcaataaatatcc

SEQ ID NO: 558 - RNA, 21 nt, synthetic construct
  source 1..21: mol_type = other RNA
tgaggacgaggtcaataaata

SEQ ID NO: 559 - RNA, 21 nt, synthetic construct
  source 1..21: mol_type = other RNA
atcggaggacgaggtcaataa

SEQ ID NO: 560 - RNA, 21 nt, synthetic construct
  source 1..21: mol_type = other RNA
tcagcgagtcggaggacgagg

SEQ ID NO: 561 - RNA, 21 nt, synthetic construct
  source 1..21: mol_type = other RNA
atgtcagcgagtcggaggacg

SEQ ID NO: 562 - RNA, 21 nt, synthetic construct
  source 1..21: mol_type = other RNA
atccaaaacgtggattgggtg

SEQ ID NO: 563 - RNA, 21 nt, synthetic construct
  source 1..21: mol_type = other RNA
aatccaaaacgtggattgggt

SEQ ID NO: 564 - RNA, 21 nt, synthetic construct
  source 1..21: mol_type = other RNA
tcatccaaaacgtggattggg

SEQ ID NO: 565 - RNA, 21 nt, synthetic construct
  source 1..21: mol_type = other RNA
tgcatccaaaacgtggattgg

SEQ ID NO: 566 - RNA, 21 nt, synthetic construct
  source 1..21: mol_type = other RNA
atgcatccaaaacgtggattg

SEQ ID NO: 567 - RNA, 21 nt, synthetic construct
  source 1..21: mol_type = other RNA
aagtgcatccaaaacgtggat

SEQ ID NO: 568 - RNA, 21 nt, synthetic construct
  source 1..21: mol_type = other RNA
tcagtgcatccaaaacgtgga

SEQ ID NO: 569 - RNA, 21 nt, synthetic construct
  source 1..21: mol_type = other RNA
atcagtgcatccaaaacgtgg

SEQ ID NO: 570 - RNA, 21 nt, synthetic construct
  source 1..21: mol_type = other RNA
tctcagtgcatccaaaacgtg

SEQ ID NO: 571 - RNA, 21 nt, synthetic construct
  source 1..21: mol_type = other RNA
atctcagtgcatccaaaacgt

SEQ ID NO: 572 - RNA, 21 nt, synthetic construct
  source 1..21: mol_type = other RNA
agtctcagtgcatccaaaacg

SEQ ID NO: 573 - RNA, 21 nt, synthetic construct
  source 1..21: mol_type = other RNA
tagacaataaataccgaggaa

SEQ ID NO: 574 - RNA, 21 nt, synthetic construct
  source 1..21: mol_type = other RNA
tttattcgcgagggtcgggtg

SEQ ID NO: 575 - RNA, 21 nt, synthetic construct
  source 1..21: mol_type = other RNA
ttttattcgcgagggtcgggt

SEQ ID NO: 576 - RNA, 21 nt, synthetic construct
  source 1..21: mol_type = other RNA
attttattcgcgagggtcggg

SEQ ID NO: 577 - RNA, 21 nt, synthetic construct
  source 1..21: mol_type = other RNA
acttttattcgcgagggtcgg

SEQ ID NO: 578 - RNA, 21 nt, synthetic construct
  source 1..21: mol_type = other RNA
accttttattcgcgagggtcg

SEQ ID NO: 579 - RNA, 21 nt, synthetic construct
  source 1..21: mol_type = other RNA
agccttttattcgcgagggtc

SEQ ID NO: 580 - RNA, 21 nt, synthetic construct
  source 1..21: mol_type = other RNA
tagggccttttattcgcgagg

SEQ ID NO: 581 - RNA, 21 nt, synthetic construct
  source 1..21: mol_type = other RNA
tgagggccttttattcgcgag

SEQ ID NO: 582 - RNA, 21 nt, synthetic construct
  source 1..21: mol_type = other RNA
tggagggccttttattcgcga

SEQ ID NO: 583 - RNA, 21 nt, synthetic construct
  source 1..21: mol_type = other RNA
atggagggccttttattcgcg

SEQ ID NO: 584 - RNA, 21 nt, synthetic construct
  source 1..21: mol_type = other RNA
aatggagggccttttattcgc

SEQ ID NO: 585 - RNA, 19 nt, synthetic construct
  source 1..19: mol_type = other RNA
  modified_base 1: mod_base = OTHER; note = 2'-fluoroadenosine-3'-phosphorothioate
  modified_base 2: mod_base = OTHER; note = 2'-O-methylguanosine-3'-phosphorothioate
  modified_base 3: mod_base = OTHER; note = 2'-fluoroguanosine-3'-phosphate
  modified_base 4: mod_base = OTHER; note = 2'-O-methylcytidine-3'-phosphate
  modified_base 5: mod_base = OTHER; note = 2'-fluorouridine-3'-phosphate
  modified_base 6: mod_base = OTHER; note = 2'-O-methyluridine-3'-phosphate
  modified_base 7: mod_base = OTHER; note = 2'-fluoroadenosine-3'-phosphate
  modified_base 8: mod_base = OTHER; note = 2'-O-methyladenosine-3'-phosphate
  modified_base 9: mod_base = OTHER; note = 2'-fluoroguanosine-3'-phosphate
  modified_base 10: mod_base = OTHER; note = 2'-O-methylguanosine-3'-phosphate
  modified_base 11: mod_base = OTHER; note = 2'-fluoroadenosine-3'-phosphate
  modified_base 12: mod_base = OTHER; note = 2'-O-methylguanosine-3'-phosphate
  modified_base 13: mod_base = OTHER; note = 2'-fluoroguanosine-3'-phosphate
  modified_base 14: mod_base = OTHER; note = 2'-O-methyluridine-3'-phosphate
  modified_base 15: mod_base = OTHER; note = 2'-fluorocytidine-3'-phosphate
  modified_base 16: mod_base = OTHER; note = 2'-O-methylcytidine-3'-phosphate
  modified_base 17: mod_base = OTHER; note = 2'-fluoroguanosine-3'-phosphorothioate
  modified_base 18: mod_base = OTHER; note = 2'-O-methyladenosine-3'-phosphorothioate
  modified_base 19: mod_base = OTHER; note = 2'-fluorouridine
aggcttaaggaggtccgat

SEQ ID NO: 586 - RNA, 19 nt, synthetic construct
  source 1..19: mol_type = other RNA
  modified_base 1: mod_base = OTHER; note = 2'-fluoroguanosine-3'-phosphorothioate
  modified_base 2: mod_base = OTHER; note = 2'-O-methylguanosine-3'-phosphorothioate
  modified_base 3: mod_base = OTHER; note = 2'-fluorocytidine-3'-phosphate
  modified_base 4: mod_base = OTHER; note = 2'-O-methyluridine-3'-phosphate
  modified_base 5: mod_base = OTHER; note = 2'-fluorouridine-3'-phosphate
  modified_base 6: mod_base = OTHER; note = 2'-O-methyladenosine-3'-phosphate
  modified_base 7: mod_base = OTHER; note = 2'-fluoroadenosine-3'-phosphate
  modified_base 8: mod_base = OTHER; note = 2'-O-methylguanosine-3'-phosphate
  modified_base 9: mod_base = OTHER; note = 2'-fluoroguanosine-3'-phosphate
  modified_base 10: mod_base = OTHER; note = 2'-O-methyladenosine-3'-phosphate
  modified_base 11: mod_base = OTHER; note = 2'-fluoroguanosine-3'-phosphate
  modified_base 12: mod_base = OTHER; note = 2'-O-methylguanosine-3'-phosphate
  modified_base 13: mod_base = OTHER; note = 2'-fluorouridine-3'-phosphate
  modified_base 14: mod_base = OTHER; note = 2'-O-methylcytidine-3'-phosphate
  modified_base 15: mod_base = OTHER; note = 2'-fluorocytidine-3'-phosphate
  modified_base 16: mod_base = OTHER; note = 2'-O-methylguanosine-3'-phosphate
  modified_base 17: mod_base = OTHER; note = 2'-fluoroadenosine-3'-phosphorothioate
  modified_base 18: mod_base = OTHER; note = 2'-O-methylcytidine-3'-phosphorothioate
  modified_base 19: mod_base = OTHER; note = 2'-fluorouridine
ggcttaaggaggtccgact

SEQ ID NO: 587 - RNA, 19 nt, synthetic construct
  source 1..19: mol_type = other RNA
  modified_base 1: mod_base = OTHER; note = 2'-fluoroguanosine-3'-phosphorothioate
  modified_base 2: mod_base = OTHER; note = 2'-O-methylcytidine-3'-phosphorothioate
  modified_base 3: mod_base = OTHER; note = 2'-fluorouridine-3'-phosphate
  modified_base 4: mod_base = OTHER; note = 2'-O-methyluridine-3'-phosphate
  modified_base 5: mod_base = OTHER; note = 2'-fluoroadenosine-3'-phosphate
  modified_base 6: mod_base = OTHER; note = 2'-O-methyladenosine-3'-phosphate
  modified_base 7: mod_base = OTHER; note = 2'-fluoroguanosine-3'-phosphate
  modified_base 8: mod_base = OTHER; note = 2'-O-methylguanosine-3'-phosphate
  modified_base 9: mod_base = OTHER; note = 2'-fluoroadenosine-3'-phosphate
  modified_base 10: mod_base = OTHER; note = 2'-O-methylguanosine-3'-phosphate
  modified_base 11: mod_base = OTHER; note = 2'-fluoroguanosine-3'-phosphate
  modified_base 12: mod_base = OTHER; note = 2'-O-methyluridine-3'-phosphate
  modified_base 13: mod_base = OTHER; note = 2'-fluorocytidine-3'-phosphate
  modified_base 14: mod_base = OTHER; note = 2'-O-methylcytidine-3'-phosphate
  modified_base 15: mod_base = OTHER; note = 2'-fluoroguanosine-3'-phosphate
  modified_base 16: mod_base = OTHER; note = 2'-O-methyladenosine-3'-phosphate
  modified_base 17: mod_base = OTHER; note = 2'-fluorocytidine-3'-phosphorothioate
  modified_base 18: mod_base = OTHER; note = 2'-O-methyluridine-3'-phosphorothioate
  modified_base 19: mod_base = OTHER; note = 2'-fluorouridine
gcttaaggaggtccgactt

SEQ ID NO: 588 - RNA, 19 nt, synthetic construct
  source 1..19: mol_type = other RNA
  modified_base 1: mod_base = OTHER; note = 2'-fluoroadenosine-3'-phosphorothioate
  modified_base 2: mod_base = OTHER; note = 2'-O-methyladenosine-3'-phosphorothioate
  modified_base 3: mod_base = OTHER; note = 2'-fluoroguanosine-3'-phosphate
  modified_base 4: mod_base = OTHER; note = 2'-O-methyluridine-3'-phosphate
  modified_base 5: mod_base = OTHER; note = 2'-fluoroguanosine-3'-phosphate
  modified_base 6: mod_base = OTHER; note = 2'-O-methylguanosine-3'-phosphate
  modified_base 7: mod_base = OTHER; note = 2'-fluoroguanosine-3'-phosphate
  modified_base 8: mod_base = OTHER; note = 2'-O-methyladenosine-3'-phosphate
  modified_base 9: mod_base = OTHER; note = 2'-fluorocytidine-3'-phosphate
  modified_base 10: mod_base = OTHER; note = 2'-O-methyladenosine-3'-phosphate
  modified_base 11: mod_base = OTHER; note = 2'-fluorouridine-3'-phosphate
  modified_base 12: mod_base = OTHER; note = 2'-O-methylguanosine-3'-phosphate
  modified_base 13: mod_base = OTHER; note = 2'-fluorocytidine-3'-phosphate
  modified_base 14: mod_base = OTHER; note = 2'-O-methyluridine-3'-phosphate
  modified_base 15: mod_base = OTHER; note = 2'-fluoroguanosine-3'-phosphate
  modified_base 16: mod_base = OTHER; note = 2'-O-methyladenosine-3'-phosphate
  modified_base 17: mod_base = OTHER; note = 2'-fluoroadenosine-3'-phosphorothioate
  modified_base 18: mod_base = OTHER; note = 2'-O-methylguanosine-3'-phosphorothioate
  modified_base 19: mod_base = OTHER; note = 2'-fluoroadenosine
aagtgggacatgctgaaga

SEQ ID NO: 589 - RNA, 19 nt, synthetic construct
  source 1..19: mol_type = other RNA
  modified_base 1: mod_base = OTHER; note = 2'-fluoroadenosine-3'-phosphorothioate
  modified_base 2: mod_base = OTHER; note = 2'-O-methylguanosine-3'-phosphorothioate
  modified_base 3: mod_base = OTHER; note = 2'-fluorouridine-3'-phosphate
  modified_base 4: mod_base = OTHER; note = 2'-O-methylguanosine-3'-phosphate
  modified_base 5: mod_base = OTHER; note = 2'-fluoroguanosine-3'-phosphate
  modified_base 6: mod_base = OTHER; note = 2'-O-methylguanosine-3'-phosphate
  modified_base 7: mod_base = OTHER; note = 2'-fluoroadenosine-3'-phosphate
  modified_base 8: mod_base = OTHER; note = 2'-O-methylcytidine-3'-phosphate
  modified_base 9: mod_base = OTHER; note = 2'-fluoroadenosine-3'-phosphate
  modified_base 10: mod_base = OTHER; note = 2'-O-methyluridine-3'-phosphate
  modified_base 11: mod_base = OTHER; note = 2'-fluoroguanosine-3'-phosphate
  modified_base 12: mod_base = OTHER; note = 2'-O-methylcytidine-3'-phosphate
  modified_base 13: mod_base = OTHER; note = 2'-fluorouridine-3'-phosphate
  modified_base 14: mod_base = OTHER; note = 2'-O-methylguanosine-3'-phosphate
  modified_base 15: mod_base = OTHER; note = 2'-fluoroadenosine-3'-phosphate
  modified_base 16: mod_base = OTHER; note = 2'-O-methyladenosine-3'-phosphate
  modified_base 17: mod_base = OTHER; note = 2'-fluoroguanosine-3'-phosphorothioate
  modified_base 18: mod_base = OTHER; note = 2'-O-methyladenosine-3'-phosphorothioate
  modified_base 19: mod_base = OTHER; note = 2'-fluorouridine
agtgggacatgctgaagat

SEQ ID NO: 590 - RNA, 19 nt, synthetic construct
  source 1..19: mol_type = other RNA
  modified_base 1: mod_base = OTHER; note = 2'-fluoroguanosine-3'-phosphorothioate
  modified_base 2: mod_base = OTHER; note = 2'-O-methylguanosine-3'-phosphorothioate
  modified_base 3: mod_base = OTHER; note = 2'-fluorocytidine-3'-phosphate
  modified_base 4: mod_base = OTHER; note = 2'-O-methylguanosine-3'-phosphate
  modified_base 5: mod_base = OTHER; note = 2'-fluoroadenosine-3'-phosphate
  modified_base 6: mod_base = OTHER; note = 2'-O-methylguanosine-3'-phosphate
  modified_base 7: mod_base = OTHER; note = 2'-fluoroguanosine-3'-phosphate
  modified_base 8: mod_base = OTHER; note = 2'-O-methyluridine-3'-phosphate
  modified_base 9: mod_base = OTHER; note = 2'-fluoroguanosine-3'-phosphate
  modified_base 10: mod_base = OTHER; note = 2'-O-methyluridine-3'-phosphate
  modified_base 11: mod_base = OTHER; note = 2'-fluorocytidine-3'-phosphate
  modified_base 12: mod_base = OTHER; note = 2'-O-methylguanosine-3'-phosphate
  modified_base 13: mod_base = OTHER; note = 2'-fluorouridine-3'-phosphate
  modified_base 14: mod_base = OTHER; note = 2'-O-methylguanosine-3'-phosphate
  modified_base 15: mod_base = OTHER; note = 2'-fluorocytidine-3'-phosphate
  modified_base 16: mod_base = OTHER; note = 2'-O-methyluridine-3'-phosphate
  modified_base 17: mod_base = OTHER; note = 2'-fluorouridine-3'-phosphorothioate
  modified_base 18: mod_base = OTHER; note = 2'-O-methylcytidine-3'-phosphorothioate
  modified_base 19: mod_base = OTHER; note = 2'-fluorouridine
ggcgaggtgtcgtgcttct

SEQ ID NO: 591 - RNA, 19 nt, synthetic construct
  source 1..19: mol_type = other RNA
  modified_base 1: mod_base = OTHER; note = 2'-fluoroguanosine-3'-phosphorothioate
  modified_base 2: mod_base = OTHER; note = 2'-O-methylcytidine-3'-phosphorothioate
  modified_base 3: mod_base = OTHER; note = 2'-fluorocytidine-3'-phosphate
  modified_base 4: mod_base = OTHER; note = 2'-O-methyluridine-3'-phosphate
  modified_base 5: mod_base = OTHER; note = 2'-fluorouridine-3'-phosphate
  modified_base 6: mod_base = OTHER; note = 2'-O-methylcytidine-3'-phosphate
  modified_base 7: mod_base = OTHER; note = 2'-fluorocytidine-3'-phosphate
  modified_base 8: mod_base = OTHER; note = 2'-O-methyladenosine-3'-phosphate
  modified_base 9: mod_base = OTHER; note = 2'-fluoroguanosine-3'-phosphate
  modified_base 10: mod_base = OTHER; note = 2'-O-methylguanosine-3'-phosphate
  modified_base 11: mod_base = OTHER; note = 2'-fluoroadenosine-3'-phosphate
  modified_base 12: mod_base = OTHER; note = 2'-O-methyluridine-3'-phosphate
  modified_base 13: mod_base = OTHER; note = 2'-fluoroguanosine-3'-phosphate
  modified_base 14: mod_base = OTHER; note = 2'-O-methyladenosine-3'-phosphate
  modified_base 15: mod_base = OTHER; note = 2'-fluoroguanosine-3'-phosphate
  modified_base 16: mod_base = OTHER; note = 2'-O-methyladenosine-3'-phosphate
  modified_base 17: mod_base = OTHER; note = 2'-fluoroadenosine-3'-phosphorothioate
  modified_base 18: mod_base = OTHER; note = 2'-O-methylcytidine-3'-phosphorothioate
  modified_base 19: mod_base = OTHER; note = 2'-fluorouridine
gccttccaggatgagaact

SEQ ID NO: 592 - RNA, 19 nt, synthetic construct
  source 1..19: mol_type = other RNA
  modified_base 1: mod_base = OTHER; note = 2'-fluorocytidine-3'-phosphorothioate
  modified_base 2: mod_base = OTHER; note = 2'-O-methylcytidine-3'-phosphorothioate
  modified_base 3: mod_base = OTHER; note = 2'-fluorouridine-3'-phosphate
  modified_base 4: mod_base = OTHER; note = 2'-O-methyluridine-3'-phosphate
  modified_base 5: mod_base = OTHER; note = 2'-fluorocytidine-3'-phosphate
  modified_base 6: mod_base = OTHER; note = 2'-O-methylcytidine-3'-phosphate
  modified_base 7: mod_base = OTHER; note = 2'-fluoroadenosine-3'-phosphate
  modified_base 8: mod_base = OTHER; note = 2'-O-methylguanosine-3'-phosphate
  modified_base 9: mod_base = OTHER; note = 2'-fluoroguanosine-3'-phosphate
  modified_base 10: mod_base = OTHER; note = 2'-O-methyladenosine-3'-phosphate
  modified_base 11: mod_base = OTHER; note = 2'-fluorouridine-3'-phosphate
  modified_base 12: mod_base = OTHER; note = 2'-O-methylguanosine-3'-phosphate
  modified_base 13: mod_base = OTHER; note = 2'-fluoroadenosine-3'-phosphate
  modified_base 14: mod_base = OTHER; note = 2'-O-methylguanosine-3'-phosphate
  modified_base 15: mod_base = OTHER; note = 2'-fluoroadenosine-3'-phosphate
  modified_base 16: mod_base = OTHER; note = 2'-O-methyladenosine-3'-phosphate
  modified_base 17: mod_base = OTHER; note = 2'-fluorocytidine-3'-phosphorothioate
  modified_base 18: mod_base = OTHER; note = 2'-O-methyluridine-3'-phosphorothioate
  modified_base 19: mod_base = OTHER; note = 2'-fluoroadenosine
ccttccaggatgagaacta

SEQ ID NO: 593 - RNA, 19 nt, synthetic construct
  source 1..19: mol_type = other RNA
  modified_base 1: mod_base = OTHER; note = 2'-fluorocytidine-3'-phosphorothioate
  modified_base 2: mod_base = OTHER; note = 2'-O-methyluridine-3'-phosphorothioate
  modified_base 3: mod_base = OTHER; note = 2'-fluorouridine-3'-phosphate
  modified_base 4: mod_base = OTHER; note = 2'-O-methylcytidine-3'-phosphate
  modified_base 5: mod_base = OTHER; note = 2'-fluorocytidine-3'-phosphate
  modified_base 6: mod_base = OTHER; note = 2'-O-methyladenosine-3'-phosphate
  modified_base 7: mod_base = OTHER; note = 2'-fluoroguanosine-3'-phosphate
  modified_base 8: mod_base = OTHER; note = 2'-O-methylguanosine-3'-phosphate
  modified_base 9: mod_base = OTHER; note = 2'-fluoroadenosine-3'-phosphate
  modified_base 10: mod_base = OTHER; note = 2'-O-methyluridine-3'-phosphate
  modified_base 11: mod_base = OTHER; note = 2'-fluoroguanosine-3'-phosphate
  modified_base 12: mod_base = OTHER; note = 2'-O-methyladenosine-3'-phosphate
  modified_base 13: mod_base = OTHER; note = 2'-fluoroguanosine-3'-phosphate
  modified_base 14: mod_base = OTHER; note = 2'-O-methyladenosine-3'-phosphate
  modified_base 15: mod_base = OTHER; note = 2'-fluoroadenosine-3'-phosphate
  modified_base 16: mod_base = OTHER; note = 2'-O-methylcytidine-3'-phosphate
  modified_base 17: mod_base = OTHER; note = 2'-fluorouridine-3'-phosphorothioate
  modified_base 18: mod_base = OTHER; note = 2'-O-methyladenosine-3'-phosphorothioate
  modified_base 19: mod_base = OTHER; note = 2'-fluorouridine
cttccaggatgagaactat

SEQ ID NO: 594 - RNA, 19 nt, synthetic construct
  source 1..19: mol_type = other RNA
  modified_base 1: mod_base = OTHER; note = 2'-fluorocytidine-3'-phosphorothioate
  modified_base 2: mod_base = OTHER; note = 2'-O-methylcytidine-3'-phosphorothioate
  modified_base 3: mod_base = OTHER; note = 2'-fluoroadenosine-3'-phosphate
  modified_base 4: mod_base = OTHER; note = 2'-O-methylguanosine-3'-phosphate
  modified_base 5: mod_base = OTHER; note = 2'-fluoroguanosine-3'-phosphate
  modified_base 6: mod_base = OTHER; note = 2'-O-methyladenosine-3'-phosphate
  modified_base 7: mod_base = OTHER; note = 2'-fluorouridine-3'-phosphate
  modified_base 8: mod_base = OTHER; note = 2'-O-methylguanosine-3'-phosphate
  modified_base 9: mod_base = OTHER; note = 2'-fluoroadenosine-3'-phosphate
  modified_base 10: mod_base = OTHER; note = 2'-O-methylguanosine-3'-phosphate
  modified_base 11: mod_base = OTHER; note = 2'-fluoroadenosine-3'-phosphate
  modified_base 12: mod_base = OTHER; note = 2'-O-methyladenosine-3'-phosphate
  modified_base 13: mod_base = OTHER; note = 2'-fluorocytidine-3'-phosphate
  modified_base 14: mod_base = OTHER; note = 2'-O-methyluridine-3'-phosphate
  modified_base 15: mod_base = OTHER; note = 2'-fluoroadenosine-3'-phosphate
  modified_base 16: mod_base = OTHER; note = 2'-O-methylcytidine-3'-phosphate
  modified_base 17: mod_base = OTHER; note = 2'-fluorocytidine-3'-phosphorothioate
  modified_base 18: mod_base = OTHER; note = 2'-O-methyluridine-3'-phosphorothioate
  modified_base 19: mod_base = OTHER; note = 2'-fluoroadenosine
ccaggatgagaactaccta

SEQ ID NO: 595 - RNA, 19 nt, synthetic construct
  source 1..19: mol_type = other RNA
  modified_base 1: mod_base = OTHER; note = 2'-fluorocytidine-3'-phosphorothioate
  modified_base 2: mod_base = OTHER; note = 2'-O-methyladenosine-3'-phosphorothioate
  modified_base 3: mod_base = OTHER; note = 2'-fluoroguanosine-3'-phosphate
  modified_base 4: mod_base = OTHER; note = 2'-O-methylguanosine-3'-phosphate
  modified_base 5: mod_base = OTHER; note = 2'-fluoroadenosine-3'-phosphate
  modified_base 6: mod_base = OTHER; note = 2'-O-methyluridine-3'-phosphate
  modified_base 7: mod_base = OTHER; note = 2'-fluoroguanosine-3'-phosphate
  modified_base 8: mod_base = OTHER; note = 2'-O-methyladenosine-3'-phosphate
  modified_base 9: mod_base = OTHER; note = 2'-fluoroguanosine-3'-phosphate
  modified_base 10: mod_base = OTHER; note = 2'-O-methyladenosine-3'-phosphate
  modified_base 11: mod_base = OTHER; note = 2'-fluoroadenosine-3'-phosphate
  modified_base 12: mod_base = OTHER; note = 2'-O-methylcytidine-3'-phosphate
  modified_base 13: mod_base = OTHER; note = 2'-fluorouridine-3'-phosphate
  modified_base 14: mod_base = OTHER; note = 2'-O-methyladenosine-3'-phosphate
  modified_base 15: mod_base = OTHER; note = 2'-fluorocytidine-3'-phosphate
  modified_base 16: mod_base = OTHER; note = 2'-O-methylcytidine-3'-phosphate
  modified_base 17: mod_base = OTHER; note = 2'-fluorouridine-3'-phosphorothioate
  modified_base 18: mod_base = OTHER; note = 2'-O-methylguanosine-3'-phosphorothioate
  modified_base 19: mod_base = OTHER; note = 2'-fluorouridine
caggatgagaactacctgt

SEQ ID NO: 596 - RNA, 19 nt, synthetic construct
  source 1..19: mol_type = other RNA
  modified_base 1: mod_base = OTHER; note = 2'-fluoroadenosine-3'-phosphorothioate
  modified_base 2: mod_base = OTHER; note = 2'-O-methylguanosine-3'-phosphorothioate
  modified_base 3: mod_base = OTHER; note = 2'-fluoroguanosine-3'-phosphate
  modified_base 4: mod_base = OTHER; note = 2'-O-methyladenosine-3'-phosphate
  modified_base 5: mod_base = OTHER; note = 2'-fluorouridine-3'-phosphate
  modified_base 6: mod_base = OTHER; note = 2'-O-methylguanosine-3'-phosphate
  modified_base 7: mod_base = OTHER; note = 2'-fluoroadenosine-3'-phosphate
  modified_base 8: mod_base = OTHER; note = 2'-O-methylguanosine-3'-phosphate
  modified_base 9: mod_base = OTHER; note = 2'-fluoroadenosine-3'-phosphate
  modified_base 10: mod_base = OTHER; note = 2'-O-methyladenosine-3'-phosphate
  modified_base 11: mod_base = OTHER; note = 2'-fluorocytidine-3'-phosphate
  modified_base 12: mod_base = OTHER; note = 2'-O-methyluridine-3'-phosphate
  modified_base 13: mod_base = OTHER; note = 2'-fluoroadenosine-3'-phosphate
  modified_base 14: mod_base = OTHER; note = 2'-O-methylcytidine-3'-phosphate
  modified_base 15: mod_base = OTHER; note = 2'-fluorocytidine-3'-phosphate
  modified_base 16: mod_base = OTHER; note = 2'-O-methyluridine-3'-phosphate
  modified_base 17: mod_base = OTHER; note = 2'-fluoroguanosine-3'-phosphorothioate
  modified_base 18: mod_base = OTHER; note = 2'-O-methyluridine-3'-phosphorothioate
  modified_base 19: mod_base = OTHER; note = 2'-fluoroadenosine
aggatgagaactacctgta

SEQ ID NO: 597 - RNA, 19 nt, synthetic construct
  source 1..19: mol_type = other RNA
  modified_base 1: mod_base = OTHER; note = 2'-fluoroguanosine-3'-phosphorothioate
  modified_base 2: mod_base = OTHER; note = 2'-O-methylguanosine-3'-phosphorothioate
  modified_base 3: mod_base = OTHER; note = 2'-fluoroadenosine-3'-phosphate
  modified_base 4: mod_base = OTHER; note = 2'-O-methyluridine-3'-phosphate
  modified_base 5: mod_base = OTHER; note = 2'-fluoroguanosine-3'-phosphate
  modified_base 6: mod_base = OTHER; note = 2'-O-methyladenosine-3'-phosphate
  modified_base 7: mod_base = OTHER; note = 2'-fluoroguanosine-3'-phosphate
  modified_base 8: mod_base = OTHER; note = 2'-O-methyladenosine-3'-phosphate
  modified_base 9: mod_base = OTHER; note = 2'-fluoroadenosine-3'-phosphate
  modified_base 10: mod_base = OTHER; note = 2'-O-methylcytidine-3'-phosphate
  modified_base 11: mod_base = OTHER; note = 2'-fluorouridine-3'-phosphate
  modified_base 12: mod_base = OTHER; note = 2'-O-methyladenosine-3'-phosphate
  modified_base 13: mod_base = OTHER; note = 2'-fluorocytidine-3'-phosphate
  modified_base 14: mod_base = OTHER; note = 2'-O-methylcytidine-3'-phosphate
  modified_base 15: mod_base = OTHER; note = 2'-fluorouridine-3'-phosphate
  modified_base 16: mod_base = OTHER; note = 2'-O-methylguanosine-3'-phosphate
  modified_base 17: mod_base = OTHER; note = 2'-fluorouridine-3'-phosphorothioate
  modified_base 18: mod_base = OTHER; note = 2'-O-methyladenosine-3'-phosphorothioate
  modified_base 19: mod_base = OTHER; note = 2'-fluorouridine
ggatgagaactacctgtat

SEQ ID NO: 598 - RNA, 19 nt, synthetic construct
  source 1..19: mol_type = other RNA
  modified_base 1: mod_base = OTHER; note = 2'-fluoroadenosine-3'-phosphorothioate
  modified_base 2: mod_base = OTHER; note = 2'-O-methylcytidine-3'-phosphorothioate
  modified_base 3: mod_base = OTHER; note = 2'-fluorouridine-3'-phosphate
  modified_base 4: mod_base = OTHER; note = 2'-O-methyladenosine-3'-phosphate
  modified_base 5: mod_base = OTHER; note = 2'-fluorocytidine-3'-phosphate
  modified_base 6: mod_base = OTHER; note = 2'-O-methylcytidine-3'-phosphate
  modified_base 7: mod_base = OTHER; note = 2'-fluorouridine-3'-phosphate
  modified_base 8: mod_base = OTHER; note = 2'-O-methylguanosine-3'-phosphate
  modified_base 9: mod_base = OTHER; note = 2'-fluorouridine-3'-phosphate
  modified_base 10: mod_base = OTHER; note = 2'-O-methyladenosine-3'-phosphate
  modified_base 11: mod_base = OTHER; note = 2'-fluorocytidine-3'-phosphate
  modified_base 12: mod_base = OTHER; note = 2'-O-methylcytidine-3'-phosphate
  modified_base 13: mod_base = OTHER; note = 2'-fluorouridine-3'-phosphate
  modified_base 14: mod_base = OTHER; note = 2'-O-methylguanosine-3'-phosphate
  modified_base 15: mod_base = OTHER; note = 2'-fluoroguanosine-3'-phosphate
  modified_base 16: mod_base = OTHER; note = 2'-O-methyluridine-3'-phosphate
  modified_base 17: mod_base = OTHER; note = 2'-fluorocytidine-3'-phosphorothioate
  modified_base 18: mod_base = OTHER; note = 2'-O-methyladenosine-3'-phosphorothioate
  modified_base 19: mod_base = OTHER; note = 2'-fluorouridine
actacctgtacctggtcat

SEQ ID NO: 599 - RNA, 19 nt, synthetic construct
  source 1..19: mol_type = other RNA
  modified_base 1: mod_base = OTHER; note = 2'-fluorocytidine-3'-phosphorothioate
  modified_base 2: mod_base = OTHER; note = 2'-O-methyluridine-3'-phosphorothioate
  modified_base 3: mod_base = OTHER; note = 2'-fluoroadenosine-3'-phosphate
  modified_base 4: mod_base = OTHER; note = 2'-O-methylcytidine-3'-phosphate
  modified_base 5: mod_base = OTHER; note = 2'-fluorocytidine-3'-phosphate
  modified_base 6: mod_base = OTHER; note = 2'-O-methyluridine-3'-phosphate
  modified_base 7: mod_base = OTHER; note = 2'-fluoroguanosine-3'-phosphate
  modified_base 8: mod_base = OTHER; note = 2'-O-methyluridine-3'-phosphate
  modified_base 9: mod_base = OTHER; note = 2'-fluoroadenosine-3'-phosphate
  modified_base 10: mod_base = OTHER; note = 2'-O-methylcytidine-3'-phosphate
  modified_base 11: mod_base = OTHER; note = 2'-fluorocytidine-3'-phosphate
  modified_base 12: mod_base = OTHER; note = 2'-O-methyluridine-3'-phosphate
  modified_base 13: mod_base = OTHER; note = 2'-fluoroguanosine-3'-phosphate
  modified_base 14: mod_base = OTHER; note = 2'-O-methylguanosine-3'-phosphate
  modified_base 15: mod_base = OTHER; note = 2'-fluorouridine-3'-phosphate
  modified_base 16: mod_base = OTHER; note = 2'-O-methylcytidine-3'-phosphate
  modified_base 17: mod_base = OTHER; note = 2'-fluoroadenosine-3'-phosphorothioate
  modified_base 18: mod_base = OTHER; note = 2'-O-methyluridine-3'-phosphorothioate
  modified_base 19: mod_base = OTHER; note = 2'-fluorouridine
ctacctgtacctggtcatt

SEQ ID NO: 600 - RNA, 19 nt, synthetic construct
  source 1..19: mol_type = other RNA
  modified_base 1: mod_base = OTHER; note = 2'-fluorouridine-3'-phosphorothioate
  modified_base 2: mod_base = OTHER; note = 2'-O-methyladenosine-3'-phosphorothioate
  modified_base 3: mod_base = OTHER; note = 2'-fluorocytidine-3'-phosphate
  modified_base 4: mod_base = OTHER; note = 2'-O-methylcytidine-3'-phosphate
  modified_base 5: mod_base = OTHER; note = 2'-fluorouridine-3'-phosphate
  modified_base 6: mod_base = OTHER; note = 2'-O-methylguanosine-3'-phosphate
  modified_base 7: mod_base = OTHER; note = 2'-fluorouridine-3'-phosphate
  modified_base 8: mod_base = OTHER; note = 2'-O-methyladenosine-3'-phosphate
  modified_base 9: mod_base = OTHER; note = 2'-fluorocytidine-3'-phosphate
  modified_base 10: mod_base = OTHER; note = 2'-O-methylcytidine-3'-phosphate
  modified_base 11: mod_base = OTHER; note = 2'-fluorouridine-3'-phosphate
  modified_base 12: mod_base = OTHER; note = 2'-O-methylguanosine-3'-phosphate
  modified_base 13: mod_base = OTHER; note = 2'-fluoroguanosine-3'-phosphate
  modified_base 14: mod_base = OTHER; note = 2'-O-methyluridine-3'-phosphate
  modified_base 15: mod_base = OTHER; note = 2'-fluorocytidine-3'-phosphate
  modified_base 16: mod_base = OTHER; note = 2'-O-methyladenosine-3'-phosphate
  modified_base 17: mod_base = OTHER; note = 2'-fluorouridine-3'-phosphorothioate
  modified_base 18: mod_base = OTHER; note = 2'-O-methylguanosine-3'-phosphorothioate
  modified_base 19: mod_base = OTHER; note = 2'-fluorouridine
tacctgtacctggtcatgt

SEQ ID NO: 601 - RNA, 19 nt, synthetic construct
  source 1..19: mol_type = other RNA
  modified_base 1: mod_base = OTHER; note = 2'-fluoroadenosine-3'-phosphorothioate
  modified_base 2: mod_base = OTHER; note = 2'-O-methylcytidine-3'-phosphorothioate
  modified_base 3: mod_base = OTHER; note = 2'-fluorocytidine-3'-phosphate
  modified_base 4: mod_base = OTHER; note = 2'-O-methyluridine-3'-phosphate
  modified_base 5: mod_base = OTHER; note = 2'-fluoroguanosine-3'-phosphate
  modified_base 6: mod_base = OTHER; note = 2'-O-methyluridine-3'-phosphate
  modified_base 7: mod_base = OTHER; note = 2'-fluoroadenosine-3'-phosphate
  modified_base 8: mod_base = OTHER; note = 2'-O-methylcytidine-3'-phosphate
  modified_base 9: mod_base = OTHER; note = 2'-fluorocytidine-3'-phosphate
  modified_base 10: mod_base = OTHER; note = 2'-O-methyluridine-3'-phosphate
  modified_base 11: mod_base = OTHER; note = 2'-fluoroguanosine-3'-phosphate
  modified_base 12: mod_base = OTHER; note = 2'-O-methylguanosine-3'-phosphate
  modified_base 13: mod_base = OTHER; note = 2'-fluorouridine-3'-phosphate
  modified_base 14: mod_base = OTHER; note = 2'-O-methylcytidine-3'-phosphate
  modified_base 15: mod_base = OTHER; note = 2'-fluoroadenosine-3'-phosphate
  modified_base 16: mod_base = OTHER; note = 2'-O-methyluridine-3'-phosphate
  modified_base 17: mod_base = OTHER; note = 2'-fluoroguanosine-3'-phosphorothioate
  modified_base 18: mod_base = OTHER; note = 2'-O-methylguanosine-3'-phosphorothioate
  modified_base 19: mod_base = OTHER; note = 2'-fluoroadenosine
acctgtacctggtcatgga

SEQ ID NO: 602 - RNA, 19 nt, synthetic construct
  source 1..19: mol_type = other RNA
  modified_base 1: mod_base = OTHER; note = 2'-fluoroguanosine-3'-phosphorothioate
  modified_base 2: mod_base = OTHER; note = 2'-O-methylcytidine-3'-phosphorothioate
  modified_base 3: mod_base = OTHER; note = 2'-fluorouridine-3'-phosphate
  modified_base 4: mod_base = OTHER; note = 2'-O-methylguanosine-3'-phosphate
  modified_base 5: mod_base = OTHER; note = 2'-fluoroadenosine-3'-phosphate
  modified_base 6: mod_base = OTHER; note = 2'-O-methylguanosine-3'-phosphate
  modified_base 7: mod_base = OTHER; note = 2'-fluorocytidine-3'-phosphate
  modified_base 8: mod_base = OTHER; note = 2'-O-methyladenosine-3'-phosphate
  modified_base 9: mod_base = OTHER; note = 2'-fluoroadenosine-3'-phosphate
  modified_base 10: mod_base = OTHER; note = 2'-O-methylguanosine-3'-phosphate
  modified_base 11: mod_base = OTHER; note = 2'-fluorouridine-3'-phosphate
  modified_base 12: mod_base = OTHER; note = 2'-O-methyluridine-3'-phosphate
  modified_base 13: mod_base = OTHER; note = 2'-fluorouridine-3'-phosphate
  modified_base 14: mod_base = OTHER; note = 2'-O-methylguanosine-3'-phosphate
  modified_base 15: mod_base = OTHER; note = 2'-fluoroguanosine-3'-phosphate
  modified_base 16: mod_base = OTHER; note = 2'-O-methylguanosine-3'-phosphate
  modified_base 17: mod_base = OTHER; note = 2'-fluoroguanosine-3'-phosphorothioate
  modified_base 18: mod_base = OTHER; note = 2'-O-methyladenosine-3'-phosphorothioate
  modified_base 19: mod_base = OTHER; note = 2'-fluorouridine
gctgagcaagtttggggat

SEQ ID NO: 603 - RNA, 19 nt, synthetic construct
  source 1..19: mol_type = other RNA
  modified_base 1: mod_base = OTHER; note = 2'-fluoroguanosine-3'-phosphorothioate
  modified_base 2: mod_base = OTHER; note = 2'-O-methylcytidine-3'-phosphorothioate
  modified_base 3: mod_base = OTHER; note = 2'-fluoroadenosine-3'-phosphate
  modified_base 4: mod_base = OTHER; note = 2'-O-methyladenosine-3'-phosphate
  modified_base 5: mod_base = OTHER; note = 2'-fluoroguanosine-3'-phosphate
  modified_base 6: mod_base = OTHER; note = 2'-O-methyluridine-3'-phosphate
  modified_base 7: mod_base = OTHER; note = 2'-fluorouridine-3'-phosphate
  modified_base 8: mod_base = OTHER; note = 2'-O-methyluridine-3'-phosphate
  modified_base 9: mod_base = OTHER; note = 2'-fluoroguanosine-3'-phosphate
  modified_base 10: mod_base = OTHER; note = 2'-O-methylguanosine-3'-phosphate
  modified_base 11: mod_base = OTHER; note = 2'-fluoroguanosine-3'-phosphate
  modified_base 12: mod_base = OTHER; note = 2'-O-methylguanosine-3'-phosphate
  modified_base 13: mod_base = OTHER; note = 2'-fluoroadenosine-3'-phosphate
  modified_base 14: mod_base = OTHER; note = 2'-O-methylguanosine-3'-phosphate
  modified_base 15: mod_base = OTHER; note = 2'-fluorocytidine-3'-phosphate
  modified_base 16: mod_base = OTHER; note = 2'-O-methylguanosine-3'-phosphate
  modified_base 17: mod_base = OTHER; note = 2'-fluoroguanosine-3'-phosphorothioate
  modified_base 18: mod_base = OTHER; note = 2'-O-methyladenosine-3'-phosphorothioate
  modified_base 19: mod_base = OTHER; note = 2'-fluorouridine
gcaagtttggggagcggat

SEQ ID NO: 604 - RNA, 19 nt, synthetic construct
  source 1..19: mol_type = other RNA
  modified_base 1: mod_base = OTHER; note = 2'-fluoroguanosine-3'-phosphorothioate
  modified_base 2: mod_base = OTHER; note = 2'-O-methyladenosine-3'-phosphorothioate
  modified_base 3: mod_base = OTHER; note = 2'-fluoroguanosine-3'-phosphate
  modified_base 4: mod_base = OTHER; note = 2'-O-methyladenosine-3'-phosphate
  modified_base 5: mod_base = OTHER; note = 2'-fluorouridine-3'-phosphate
  modified_base 6: mod_base = OTHER; note = 2'-O-methyluridine-3'-phosphate
  modified_base 7: mod_base = OTHER; note = 2'-fluoroguanosine-3'-phosphate
  modified_base 8: mod_base = OTHER; note = 2'-O-methyluridine-3'-phosphate
  modified_base 9: mod_base = OTHER; note = 2'-fluorocytidine-3'-phosphate
  modified_base 10: mod_base = OTHER; note = 2'-O-methyladenosine-3'-phosphate
  modified_base 11: mod_base = OTHER; note = 2'-fluorouridine-3'-phosphate
  modified_base 12: mod_base = OTHER; note = 2'-O-methylguanosine-3'-phosphate
  modified_base 13: mod_base = OTHER; note = 2'-fluoroguanosine-3'-phosphate
  modified_base 14: mod_base = OTHER; note = 2'-O-methylcytidine-3'-phosphate
  modified_base 15: mod_base = OTHER; note = 2'-fluorocytidine-3'-phosphate
  modified_base 16: mod_base = OTHER; note = 2'-O-methyladenosine-3'-phosphate
  modified_base 17: mod_base = OTHER; note = 2'-fluorouridine-3'-phosphorothioate
  modified_base 18: mod_base = OTHER; note = 2'-O-methyladenosine-3'-phosphorothioate
  modified_base 19: mod_base = OTHER; note = 2'-fluorouridine
gagattgtcatggccatat

SEQ ID NO: 605 - RNA, 19 nt, synthetic construct
  source 1..19: mol_type = other RNA
  modified_base 1: mod_base = OTHER; note = 2'-fluoroadenosine-3'-phosphorothioate
  modified_base 2: mod_base = OTHER; note = 2'-O-methylguanosine-3'-phosphorothioate
  modified_base 3: mod_base = OTHER; note = 2'-fluoroadenosine-3'-phosphate
  modified_base 4: mod_base = OTHER; note = 2'-O-methyluridine-3'-phosphate
  modified_base 5: mod_base = OTHER; note = 2'-fluorouridine-3'-phosphate
  modified_base 6: mod_base = OTHER; note = 2'-O-methylguanosine-3'-phosphate
  modified_base 7: mod_base = OTHER; note = 2'-fluorouridine-3'-phosphate
  modified_base 8: mod_base = OTHER; note = 2'-O-methylcytidine-3'-phosphate
  modified_base 9: mod_base = OTHER; note = 2'-fluoroadenosine-3'-phosphate
  modified_base 10: mod_base = OTHER; note = 2'-O-methyluridine-3'-phosphate
  modified_base 11: mod_base = OTHER; note = 2'-fluoroguanosine-3'-phosphate
  modified_base 12: mod_base = OTHER; note = 2'-O-methylguanosine-3'-phosphate
  modified_base 13: mod_base = OTHER; note = 2'-fluorocytidine-3'-phosphate
  modified_base 14: mod_base = OTHER; note = 2'-O-methylcytidine-3'-phosphate
  modified_base 15: mod_base = OTHER; note = 2'-fluoroadenosine-3'-phosphate
  modified_base 16: mod_base = OTHER; note = 2'-O-methyluridine-3'-phosphate
  modified_base 17: mod_base = OTHER; note = 2'-fluoroadenosine-3'-phosphorothioate
  modified_base 18: mod_base = OTHER; note = 2'-O-methylguanosine-3'-phosphorothioate
  modified_base 19: mod_base = OTHER; note = 2'-fluoroadenosine
agattgtcatggccataga

SEQ ID NO: 606 - RNA, 19 nt, synthetic construct
  source 1..19: mol_type = other RNA
  modified_base 1: mod_base = OTHER; note = 2'-fluoroguanosine-3'-phosphorothioate
  modified_base 2: mod_base = OTHER; note = 2'-O-methylguanosine-3'-phosphorothioate
  modified_base 3: mod_base = OTHER; note = 2'-fluorocytidine-3'-phosphate
  modified_base 4: mod_base = OTHER; note = 2'-O-methyluridine-3'-phosphate
  modified_base 5: mod_base = OTHER; note = 2'-fluoroadenosine-3'-phosphate
  modified_base 6: mod_base = OTHER; note = 2'-O-methylcytidine-3'-phosphate
  modified_base 7: mod_base = OTHER; note = 2'-fluoroguanosine-3'-phosphate
  modified_base 8: mod_base = OTHER; note = 2'-O-methyluridine-3'-phosphate
  modified_base 9: mod_base = OTHER; note = 2'-fluoroguanosine-3'-phosphate
  modified_base 10: mod_base = OTHER; note = 2'-O-methylcytidine-3'-phosphate
  modified_base 11: mod_base = OTHER; note = 2'-fluoroadenosine-3'-phosphate
  modified_base 12: mod_base = OTHER; note = 2'-O-methylcytidine-3'-phosphate
  modified_base 13: mod_base = OTHER; note = 2'-fluoroadenosine-3'-phosphate
  modified_base 14: mod_base = OTHER; note = 2'-O-methylguanosine-3'-phosphate
  modified_base 15: mod_base = OTHER; note = 2'-fluoroguanosine-3'-phosphate
  modified_base 16: mod_base = OTHER; note = 2'-O-methylguanosine-3'-phosphate
  modified_base 17: mod_base = OTHER; note = 2'-fluoroadenosine-3'-phosphorothioate
  modified_base 18: mod_base = OTHER; note = 2'-O-methylcytidine-3'-phosphorothioate
  modified_base 19: mod_base = OTHER; note = 2'-fluoroadenosine
ggctacgtgcacagggaca

SEQ ID NO: 607 - RNA, 19 nt, synthetic construct
  source 1..19: mol_type = other RNA
  modified_base 1: mod_base = OTHER; note = 2'-fluoroguanosine-3'-phosphorothioate
  modified_base 2: mod_base = OTHER; note = 2'-O-methylcytidine-3'-phosphorothioate
  modified_base 3: mod_base = OTHER; note = 2'-fluorouridine-3'-phosphate
  modified_base 4: mod_base = OTHER; note = 2'-O-methyladenosine-3'-phosphate
  modified_base 5: mod_base = OTHER; note = 2'-fluorocytidine-3'-phosphate
  modified_base 6: mod_base = OTHER; note = 2'-O-methylguanosine-3'-phosphate
  modified_base 7: mod_base = OTHER; note = 2'-fluorouridine-3'-phosphate
  modified_base 8: mod_base = OTHER; note = 2'-O-methylguanosine-3'-phosphate
  modified_base 9: mod_base = OTHER; note = 2'-fluorocytidine-3'-phosphate
  modified_base 10: mod_base = OTHER; note = 2'-O-methyladenosine-3'-phosphate
  modified_base 11: mod_base = OTHER; note = 2'-fluorocytidine-3'-phosphate
  modified_base 12: mod_base = OTHER; note = 2'-O-methyladenosine-3'-phosphate
  modified_base 13: mod_base = OTHER; note = 2'-fluoroguanosine-3'-phosphate
  modified_base 14: mod_base = OTHER; note = 2'-O-methylguanosine-3'-phosphate
  modified_base 15: mod_base = OTHER; note = 2'-fluoroguanosine-3'-phosphate
  modified_base 16: mod_base = OTHER; note = 2'-O-methyladenosine-3'-phosphate
  modified_base 17: mod_base = OTHER; note = 2'-fluorocytidine-3'-phosphorothioate
  modified_base 18: mod_base = OTHER; note = 2'-O-methyladenosine-3'-phosphorothioate
  modified_base 19: mod_base = OTHER; note = 2'-fluorouridine
gctacgtgcacagggacat

SEQ ID NO: 608 - RNA, 19 nt, synthetic construct
  source 1..19: mol_type = other RNA
  modified_base 1: mod_base = OTHER; note = 2'-fluorocytidine-3'-phosphorothioate
  modified_base 2: mod_base = OTHER; note = 2'-O-methyluridine-3'-phosphorothioate
  modified_base 3: mod_base = OTHER; note = 2'-fluoroadenosine-3'-phosphate
  modified_base 4: mod_base = OTHER; note = 2'-O-methylcytidine-3'-phosphate
  modified_base 5: mod_base = OTHER; note = 2'-fluoroguanosine-3'-phosphate
  modified_base 6: mod_base = OTHER; note = 2'-O-methyluridine-3'-phosphate
  modified_base 7: mod_base = OTHER; note = 2'-fluoroguanosine-3'-phosphate
  modified_base 8: mod_base = OTHER; note = 2'-O-methylcytidine-3'-phosphate
  modified_base 9: mod_base = OTHER; note = 2'-fluoroadenosine-3'-phosphate
  modified_base 10: mod_base = OTHER; note = 2'-O-methylcytidine-3'-phosphate
  modified_base 11: mod_base = OTHER; note = 2'-fluoroadenosine-3'-phosphate
  modified_base 12: mod_base = OTHER; note = 2'-O-methylguanosine-3'-phosphate
  modified_base 13: mod_base = OTHER; note = 2'-fluoroguanosine-3'-phosphate
  modified_base 14: mod_base = OTHER; note = 2'-O-methylguanosine-3'-phosphate
  modified_base 15: mod_base = OTHER; note = 2'-fluoroadenosine-3'-phosphate
  modified_base 16: mod_base = OTHER; note = 2'-O-methylcytidine-3'-phosphate
  modified_base 17: mod_base = OTHER; note = 2'-fluoroadenosine-3'-phosphorothioate
  modified_base 18: mod_base = OTHER; note = 2'-O-methyluridine-3'-phosphorothioate
  modified_base 19: mod_base = OTHER; note = 2'-fluorouridine
ctacgtgcacagggacatt

SEQ ID NO: 609 - RNA, 19 nt, synthetic construct
  source 1..19: mol_type = other RNA
  modified_base 1: mod_base = OTHER; note = 2'-fluorouridine-3'-phosphorothioate
  modified_base 2: mod_base = OTHER; note = 2'-O-methyladenosine-3'-phosphorothioate
  modified_base 3: mod_base = OTHER; note = 2'-fluorocytidine-3'-phosphate
  modified_base 4: mod_base = OTHER; note = 2'-O-methylguanosine-3'-phosphate
  modified_base 5: mod_base = OTHER; note = 2'-fluorouridine-3'-phosphate
  modified_base 6: mod_base = OTHER; note = 2'-O-methylguanosine-3'-phosphate
  modified_base 7: mod_base = OTHER; note = 2'-fluorocytidine-3'-phosphate
  modified_base 8: mod_base = OTHER; note = 2'-O-methyladenosine-3'-phosphate
  modified_base 9: mod_base = OTHER; note = 2'-fluorocytidine-3'-phosphate
  modified_base 10: mod_base = OTHER; note = 2'-O-methyladenosine-3'-phosphate
  modified_base 11: mod_base = OTHER; note = 2'-fluoroguanosine-3'-phosphate
  modified_base 12: mod_base = OTHER; note = 2'-O-methylguanosine-3'-phosphate
  modified_base 13: mod_base = OTHER; note = 2'-fluoroguanosine-3'-phosphate
  modified_base 14: mod_base = OTHER; note = 2'-O-methyladenosine-3'-phosphate
  modified_base 15: mod_base = OTHER; note = 2'-fluorocytidine-3'-phosphate
  modified_base 16: mod_base = OTHER; note = 2'-O-methyladenosine-3'-phosphate
  modified_base 17: mod_base = OTHER; note = 2'-fluorouridine-3'-phosphorothioate
  modified_base 18: mod_base = OTHER; note = 2'-O-methylcytidine-3'-phosphorothioate
  modified_base 19: mod_base = OTHER; note = 2'-fluoroadenosine
tacgtgcacagggacatca

SEQ ID NO: 610 - RNA, 19 nt, synthetic construct
  source 1..19: mol_type = other RNA
  modified_base 1: mod_base = OTHER; note = 2'-fluoroadenosine-3'-phosphorothioate
  modified_base 2: mod_base = OTHER; note = 2'-O-methylcytidine-3'-phosphorothioate
  modified_base 3: mod_base = OTHER; note = 2'-fluoroguanosine-3'-phosphate
  modified_base 4: mod_base = OTHER; note = 2'-O-methyluridine-3'-phosphate
  modified_base 5: mod_base = OTHER; note = 2'-fluoroguanosine-3'-phosphate
  modified_base 6: mod_base = OTHER; note = 2'-O-methylcytidine-3'-phosphate
  modified_base 7: mod_base = OTHER; note = 2'-fluoroadenosine-3'-phosphate
  modified_base 8: mod_base = OTHER; note = 2'-O-methylcytidine-3'-phosphate
  modified_base 9: mod_base = OTHER; note = 2'-fluoroadenosine-3'-phosphate
  modified_base 10: mod_base = OTHER; note = 2'-O-methylguanosine-3'-phosphate
  modified_base 11: mod_base = OTHER; note = 2'-fluoroguanosine-3'-phosphate
  modified_base 12: mod_base = OTHER; note = 2'-O-methylguanosine-3'-phosphate
  modified_base 13: mod_base = OTHER; note = 2'-fluoroadenosine-3'-phosphate
  modified_base 14: mod_base = OTHER; note = 2'-O-methylcytidine-3'-phosphate
  modified_base 15: mod_base = OTHER; note = 2'-fluoroadenosine-3'-phosphate
  modified_base 16: mod_base = OTHER; note = 2'-O-methyluridine-3'-phosphate
  modified_base 17: mod_base = OTHER; note = 2'-fluorocytidine-3'-phosphorothioate
  modified_base 18: mod_base = OTHER; note = 2'-O-methyladenosine-3'-phosphorothioate
  modified_base 19: mod_base = OTHER; note = 2'-fluoroadenosine
acgtgcacagggacatcaa

SEQ ID NO: 611 - RNA, 19 nt, synthetic construct
  source 1..19: mol_type = other RNA
  modified_base 1: mod_base = OTHER; note = 2'-fluorocytidine-3'-phosphorothioate
  modified_base 2: mod_base = OTHER; note = 2'-O-methylguanosine-3'-phosphorothioate
  modified_base 3: mod_base = OTHER; note = 2'-fluorouridine-3'-phosphate
  modified_base 4: mod_base = OTHER; note = 2'-O-methylguanosine-3'-phosphate
  modified_base 5: mod_base = OTHER; note = 2'-fluorocytidine-3'-phosphate
  modified_base 6: mod_base = OTHER; note = 2'-O-methyladenosine-3'-phosphate
  modified_base 7: mod_base = OTHER; note = 2'-fluorocytidine-3'-phosphate
  modified_base 8: mod_base = OTHER; note = 2'-O-methyladenosine-3'-phosphate
  modified_base 9: mod_base = OTHER; note = 2'-fluoroguanosine-3'-phosphate
  modified_base 10: mod_base = OTHER; note = 2'-O-methylguanosine-3'-phosphate
  modified_base 11: mod_base = OTHER; note = 2'-fluoroguanosine-3'-phosphate
  modified_base 12: mod_base = OTHER; note = 2'-O-methyladenosine-3'-phosphate
  modified_base 13: mod_base = OTHER; note = 2'-fluorocytidine-3'-phosphate
  modified_base 14: mod_base = OTHER; note = 2'-O-methyladenosine-3'-phosphate
  modified_base 15: mod_base = OTHER; note = 2'-fluorouridine-3'-phosphate
  modified_base 16: mod_base = OTHER; note = 2'-O-methylcytidine-3'-phosphate
  modified_base 17: mod_base = OTHER; note = 2'-fluoroadenosine-3'-phosphorothioate
  modified_base 18: mod_base = OTHER; note = 2'-O-methyladenosine-3'-phosphorothioate
  modified_base 19: mod_base = OTHER; note = 2'-fluoroadenosine
cgtgcacagggacatcaaa

SEQ ID NO: 612 - RNA, 19 nt, synthetic construct
  source 1..19: mol_type = other RNA
  modified_base 1: mod_base = OTHER; note = 2'-fluoroguanosine-3'-phosphorothioate
  modified_base 2: mod_base = OTHER; note = 2'-O-methyluridine-3'-phosphorothioate
  modified_base 3: mod_base = OTHER; note = 2'-fluoroguanosine-3'-phosphate
  modified_base 4: mod_base = OTHER; note = 2'-O-methylcytidine-3'-phosphate
  modified_base 5: mod_base = OTHER; note = 2'-fluoroadenosine-3'-phosphate
  modified_base 6: mod_base = OTHER; note = 2'-O-methylcytidine-3'-phosphate
  modified_base 7: mod_base = OTHER; note = 2'-fluoroadenosine-3'-phosphate
  modified_base 8: mod_base = OTHER; note = 2'-O-methylguanosine-3'-phosphate
  modified_base 9: mod_base = OTHER; note = 2'-fluoroguanosine-3'-phosphate
  modified_base 10: mod_base = OTHER; note = 2'-O-methylguanosine-3'-phosphate
  modified_base 11: mod_base = OTHER; note = 2'-fluoroadenosine-3'-phosphate
  modified_base 12: mod_base = OTHER; note = 2'-O-methylcytidine-3'-phosphate
  modified_base 13: mod_base = OTHER; note = 2'-fluoroadenosine-3'-phosphate
  modified_base 14: mod_base = OTHER; note = 2'-O-methyluridine-3'-phosphate
  modified_base 15: mod_base = OTHER; note = 2'-fluorocytidine-3'-phosphate
  modified_base 16: mod_base = OTHER; note = 2'-O-methyladenosine-3'-phosphate
  modified_base 17: mod_base = OTHER; note = 2'-fluoroadenosine-3'-phosphorothioate
  modified_base 18: mod_base = OTHER; note = 2'-O-methyladenosine-3'-phosphorothioate
  modified_base 19: mod_base = OTHER; note = 2'-fluorouridine
gtgcacagggacatcaaat

SEQ ID NO: 613 - RNA, 19 nt, synthetic construct
  source 1..19: mol_type = other RNA
  modified_base 1: mod_base = OTHER; note = 2'-fluorouridine-3'-phosphorothioate
  modified_base 2: mod_base = OTHER; note = 2'-O-methylguanosine-3'-phosphorothioate
  modified_base 3: mod_base = OTHER; note = 2'-fluorocytidine-3'-phosphate
  modified_base 4: mod_base = OTHER; note = 2'-O-methyladenosine-3'-phosphate
  modified_base 5: mod_base = OTHER; note = 2'-fluorocytidine-3'-phosphate
  modified_base 6: mod_base = OTHER; note = 2'-O-methyladenosine-3'-phosphate
  modified_base 7: mod_base = OTHER; note = 2'-fluoroguanosine-3'-phosphate
  modified_base 8: mod_base = OTHER; note = 2'-O-methylguanosine-3'-phosphate
  modified_base 9: mod_base = OTHER; note = 2'-fluoroguanosine-3'-phosphate
  modified_base 10: mod_base = OTHER; note = 2'-O-methyladenosine-3'-phosphate
  modified_base 11: mod_base = OTHER; note = 2'-fluorocytidine-3'-phosphate
  modified_base 12: mod_base = OTHER; note = 2'-O-methyladenosine-3'-phosphate
  modified_base 13: mod_base = OTHER; note = 2'-fluorouridine-3'-phosphate
  modified_base 14: mod_base = OTHER; note = 2'-O-methylcytidine-3'-phosphate
  modified_base 15: mod_base = OTHER; note = 2'-fluoroadenosine-3'-phosphate
  modified_base 16: mod_base = OTHER; note = 2'-O-methyladenosine-3'-phosphate
  modified_base 17: mod_base = OTHER; note = 2'-fluoroadenosine-3'-phosphorothioate
  modified_base 18: mod_base = OTHER; note = 2'-O-methylcytidine-3'-phosphorothioate
  modified_base 19: mod_base = OTHER; note = 2'-fluorouridine
tgcacagggacatcaaact

SEQ ID NO: 614 - RNA, 19 nt, synthetic construct
  source 1..19: mol_type = other RNA
  modified_base 1: mod_base = OTHER; note = 2'-fluoroguanosine-3'-phosphorothioate
  modified_base 2: mod_base = OTHER; note = 2'-O-methylguanosine-3'-phosphorothioate
  modified_base 3: mod_base = OTHER; note = 2'-fluorocytidine-3'-phosphate
  modified_base 4: mod_base = OTHER; note = 2'-O-methyluridine-3'-phosphate
  modified_base 5: mod_base = OTHER; note = 2'-fluorocytidine-3'-phosphate
  modified_base 6: mod_base = OTHER; note = 2'-O-methyladenosine-3'-phosphate
  modified_base 7: mod_base = OTHER; note = 2'-fluorocytidine-3'-phosphate
  modified_base 8: mod_base = OTHER; note = 2'-O-methyluridine-3'-phosphate
  modified_base 9: mod_base = OTHER; note = 2'-fluoroguanosine-3'-phosphate
  modified_base 10: mod_base = OTHER; note = 2'-O-methylcytidine-3'-phosphate
  modified_base 11: mod_base = OTHER; note = 2'-fluorocytidine-3'-phosphate
  modified_base 12: mod_base = OTHER; note = 2'-O-methyladenosine-3'-phosphate
  modified_base 13: mod_base = OTHER; note = 2'-fluorouridine-3'-phosphate
  modified_base 14: mod_base = OTHER; note = 2'-O-methylguanosine-3'-phosphate
  modified_base 15: mod_base = OTHER; note = 2'-fluoroguanosine-3'-phosphate
  modified_base 16: mod_base = OTHER; note = 2'-O-methyluridine-3'-phosphate
  modified_base 17: mod_base = OTHER; note = 2'-fluoroguanosine-3'-phosphorothioate
  modified_base 18: mod_base = OTHER; note = 2'-O-methyladenosine-3'-phosphorothioate
  modified_base 19: mod_base = OTHER; note = 2'-fluorouridine
ggctcactgccatggtgat

SEQ ID NO: 615 - RNA, 19 nt, synthetic construct
  source 1..19: mol_type = other RNA
  modified_base 1: mod_base = OTHER; note = 2'-fluoroguanosine-3'-phosphorothioate
  modified_base 2: mod_base = OTHER; note = 2'-O-methylcytidine-3'-phosphorothioate
  modified_base 3: mod_base = OTHER; note = 2'-fluorouridine-3'-phosphate
  modified_base 4: mod_base = OTHER; note = 2'-O-methylcytidine-3'-phosphate
  modified_base 5: mod_base = OTHER; note = 2'-fluoroadenosine-3'-phosphate
  modified_base 6: mod_base = OTHER; note = 2'-O-methylcytidine-3'-phosphate
  modified_base 7: mod_base = OTHER; note = 2'-fluorouridine-3'-phosphate
  modified_base 8: mod_base = OTHER; note = 2'-O-methylguanosine-3'-phosphate
  modified_base 9: mod_base = OTHER; note = 2'-fluorocytidine-3'-phosphate
  modified_base 10: mod_base = OTHER; note = 2'-O-methylcytidine-3'-phosphate
  modified_base 11: mod_base = OTHER; note = 2'-fluoroadenosine-3'-phosphate
  modified_base 12: mod_base = OTHER; note = 2'-O-methyluridine-3'-phosphate
  modified_base 13: mod_base = OTHER; note = 2'-fluoroguanosine-3'-phosphate
  modified_base 14: mod_base = OTHER; note = 2'-O-methylguanosine-3'-phosphate
  modified_base 15: mod_base = OTHER; note = 2'-fluorouridine-3'-phosphate
  modified_base 16: mod_base = OTHER; note = 2'-O-methylguanosine-3'-phosphate
  modified_base 17: mod_base = OTHER; note = 2'-fluoroadenosine-3'-phosphorothioate
  modified_base 18: mod_base = OTHER; note = 2'-O-methylguanosine-3'-phosphorothioate
  modified_base 19: mod_base = OTHER; note = 2'-fluorouridine
gctcactgccatggtgagt

SEQ ID NO: 616 - RNA, 19 nt, synthetic construct
  source 1..19: mol_type = other RNA
  modified_base 1: mod_base = OTHER; note = 2'-fluorocytidine-3'-phosphorothioate
  modified_base 2: mod_base = OTHER; note = 2'-O-methyluridine-3'-phosphorothioate
  modified_base 3: mod_base = OTHER; note = 2'-fluorocytidine-3'-phosphate
  modified_base 4: mod_base = OTHER; note = 2'-O-methyladenosine-3'-phosphate
  modified_base 5: mod_base = OTHER; note = 2'-fluorocytidine-3'-phosphate
  modified_base 6: mod_base = OTHER; note = 2'-O-methyluridine-3'-phosphate
  modified_base 7: mod_base = OTHER; note = 2'-fluoroguanosine-3'-phosphate
  modified_base 8: mod_base = OTHER; note = 2'-O-methylcytidine-3'-phosphate
  modified_base 9: mod_base = OTHER; note = 2'-fluorocytidine-3'-phosphate
  modified_base 10: mod_base = OTHER; note = 2'-O-methyladenosine-3'-phosphate
  modified_base 11: mod_base = OTHER; note = 2'-fluorouridine-3'-phosphate
  modified_base 12: mod_base = OTHER; note = 2'-O-methylguanosine-3'-phosphate
  modified_base 13: mod_base = OTHER; note = 2'-fluoroguanosine-3'-phosphate
  modified_base 14: mod_base = OTHER; note = 2'-O-methyluridine-3'-phosphate
  modified_base 15: mod_base = OTHER; note = 2'-fluoroguanosine-3'-phosphate
  modified_base 16: mod_base = OTHER; note = 2'-O-methyladenosine-3'-phosphate
  modified_base 17: mod_base = OTHER; note = 2'-fluoroguanosine-3'-phosphorothioate
  modified_base 18: mod_base = OTHER; note = 2'-O-methylcytidine-3'-phosphorothioate
  modified_base 19: mod_base = OTHER; note = 2'-fluorouridine
ctcactgccatggtgagct

SEQ ID NO: 617 - RNA, 19 nt, synthetic construct
  source 1..19: mol_type = other RNA
  modified_base 1: mod_base = OTHER; note = 2'-fluorouridine-3'-phosphorothioate
  modified_base 2: mod_base = OTHER; note = 2'-O-methylcytidine-3'-phosphorothioate
  modified_base 3: mod_base = OTHER; note = 2'-fluoroadenosine-3'-phosphate
  modified_base 4: mod_base = OTHER; note = 2'-O-methylcytidine-3'-phosphate
  modified_base 5: mod_base = OTHER; note = 2'-fluorouridine-3'-phosphate
  modified_base 6: mod_base = OTHER; note = 2'-O-methylguanosine-3'-phosphate
  modified_base 7: mod_base = OTHER; note = 2'-fluorocytidine-3'-phosphate
  modified_base 8: mod_base = OTHER; note = 2'-O-methylcytidine-3'-phosphate
  modified_base 9: mod_base = OTHER; note = 2'-fluoroadenosine-3'-phosphate
  modified_base 10: mod_base = OTHER; note = 2'-O-methyluridine-3'-phosphate
  modified_base 11: mod_base = OTHER; note = 2'-fluoroguanosine-3'-phosphate
  modified_base 12: mod_base = OTHER; note = 2'-O-methylguanosine-3'-phosphate
  modified_base 13: mod_base = OTHER; note = 2'-fluorouridine-3'-phosphate
  modified_base 14: mod_base = OTHER; note = 2'-O-methylguanosine-3'-phosphate
  modified_base 15: mod_base = OTHER; note = 2'-fluoroadenosine-3'-phosphate
  modified_base 16: mod_base = OTHER; note = 2'-O-methylguanosine-3'-phosphate
  modified_base 17: mod_base = OTHER; note = 2'-fluorocytidine-3'-phosphorothioate
  modified_base 18: mod_base = OTHER; note = 2'-O-methylguanosine-3'-phosphorothioate
  modified_base 19: mod_base = OTHER; note = 2'-fluorouridine
tcactgccatggtgagcgt

SEQ ID NO: 618 - RNA, 19 nt, synthetic construct
  source 1..19: mol_type = other RNA
  modified_base 1: mod_base = OTHER; note = 2'-fluorocytidine-3'-phosphorothioate
  modified_base 2: mod_base = OTHER; note = 2'-O-methyluridine-3'-phosphorothioate
  modified_base 3: mod_base = OTHER; note = 2'-fluorocytidine-3'-phosphate
  modified_base 4: mod_base = OTHER; note = 2'-O-methyladenosine-3'-phosphate
  modified_base 5: mod_base = OTHER; note = 2'-fluorocytidine-3'-phosphate
  modified_base 6: mod_base = OTHER; note = 2'-O-methylcytidine-3'-phosphate
  modified_base 7: mod_base = OTHER; note = 2'-fluorocytidine-3'-phosphate
  modified_base 8: mod_base = OTHER; note = 2'-O-methylguanosine-3'-phosphate
  modified_base 9: mod_base = OTHER; note = 2'-fluoroguanosine-3'-phosphate
  modified_base 10: mod_base = OTHER; note = 2'-O-methylcytidine-3'-phosphate
  modified_base 11: mod_base = OTHER; note = 2'-fluoroadenosine-3'-phosphate
  modified_base 12: mod_base = OTHER; note = 2'-O-methylguanosine-3'-phosphate
  modified_base 13: mod_base = OTHER; note = 2'-fluoroadenosine-3'-phosphate
  modified_base 14: mod_base = OTHER; note = 2'-O-methylguanosine-3'-phosphate
  modified_base 15: mod_base = OTHER; note = 2'-fluorocytidine-3'-phosphate
  modified_base 16: mod_base = OTHER; note = 2'-O-methylcytidine-3'-phosphate
  modified_base 17: mod_base = OTHER; note = 2'-fluorouridine-3'-phosphorothioate
  modified_base 18: mod_base = OTHER; note = 2'-O-methylguanosine-3'-phosphorothioate
  modified_base 19: mod_base = OTHER; note = 2'-fluoroadenosine
ctcacccggcagagcctga

SEQ ID NO: 619 - RNA, 19 nt, synthetic construct
  source 1..19: mol_type = other RNA
  modified_base 1: mod_base = OTHER; note = 2'-fluorouridine-3'-phosphorothioate
  modified_base 2: mod_base = OTHER; note = 2'-O-methylcytidine-3'-phosphorothioate
  modified_base 3: mod_base = OTHER; note = 2'-fluoroadenosine-3'-phosphate
  modified_base 4: mod_base = OTHER; note = 2'-O-methylcytidine-3'-phosphate
  modified_base 5: mod_base = OTHER; note = 2'-fluorocytidine-3'-phosphate
  modified_base 6: mod_base = OTHER; note = 2'-O-methylcytidine-3'-phosphate
  modified_base 7: mod_base = OTHER; note = 2'-fluoroguanosine-3'-phosphate
  modified_base 8: mod_base = OTHER; note = 2'-O-methylguanosine-3'-phosphate
  modified_base 9: mod_base = OTHER; note = 2'-fluorocytidine-3'-phosphate
  modified_base 10: mod_base = OTHER; note = 2'-O-methyladenosine-3'-phosphate
  modified_base 11: mod_base = OTHER; note = 2'-fluoroguanosine-3'-phosphate
  modified_base 12: mod_base = OTHER; note = 2'-O-methyladenosine-3'-phosphate
  modified_base 13: mod_base = OTHER; note = 2'-fluoroguanosine-3'-phosphate
  modified_base 14: mod_base = OTHER; note = 2'-O-methylcytidine-3'-phosphate
  modified_base 15: mod_base = OTHER; note = 2'-fluorocytidine-3'-phosphate
  modified_base 16: mod_base = OTHER; note = 2'-O-methyluridine-3'-phosphate
  modified_base 17: mod_base = OTHER; note = 2'-fluoroguanosine-3'-phosphorothioate
  modified_base 18: mod_base = OTHER; note = 2'-O-methyladenosine-3'-phosphorothioate
  modified_base 19: mod_base = OTHER; note = 2'-fluorouridine
tcacccggcagagcctgat

SEQ ID NO: 620 - RNA, 19 nt, synthetic construct
  source 1..19: mol_type = other RNA
  modified_base 1: mod_base = OTHER; note = 2'-fluorocytidine-3'-phosphorothioate
  modified_base 2: mod_base = OTHER; note = 2'-O-methyladenosine-3'-phosphorothioate
  modified_base 3: mod_base = OTHER; note = 2'-fluorocytidine-3'-phosphate
  modified_base 4: mod_base = OTHER; note = 2'-O-methylguanosine-3'-phosphate
  modified_base 5: mod_base = OTHER; note = 2'-fluoroguanosine-3'-phosphate
  modified_base 6: mod_base = OTHER; note = 2'-O-methyladenosine-3'-phosphate
  modified_base 7: mod_base = OTHER; note = 2'-fluorouridine-3'-phosphate
  modified_base 8: mod_base = OTHER; note = 2'-O-methylcytidine-3'-phosphate
  modified_base 9: mod_base = OTHER; note = 2'-fluorocytidine-3'-phosphate
  modified_base 10: mod_base = OTHER; note = 2'-O-methyladenosine-3'-phosphate
  modified_base 11: mod_base = OTHER; note = 2'-fluorocytidine-3'-phosphate
  modified_base 12: mod_base = OTHER; note = 2'-O-methylcytidine-3'-phosphate
  modified_base 13: mod_base = OTHER; note = 2'-fluorouridine-3'-phosphate
  modified_base 14: mod_base = OTHER; note = 2'-O-methyluridine-3'-phosphate
  modified_base 15: mod_base = OTHER; note = 2'-fluorocytidine-3'-phosphate
  modified_base 16: mod_base = OTHER; note = 2'-O-methylcytidine-3'-phosphate
  modified_base 17: mod_base = OTHER; note = 2'-fluorocytidine-3'-phosphorothioate
  modified_base 18: mod_base = OTHER; note = 2'-O-methyladenosine-3'-phosphorothioate
  modified_base 19: mod_base = OTHER; note = 2'-fluorouridine
cacggatccaccttcccat

SEQ ID NO: 621 - RNA, 19 nt, synthetic construct
  source 1..19: mol_type = other RNA
  modified_base 1: mod_base = OTHER; note = 2'-fluoroadenosine-3'-phosphorothioate
  modified_base 2: mod_base = OTHER; note = 2'-O-methylcytidine-3'-phosphorothioate
  modified_base 3: mod_base = OTHER; note = 2'-fluoroguanosine-3'-phosphate
  modified_base 4: mod_base = OTHER; note = 2'-O-methylguanosine-3'-phosphate
  modified_base 5: mod_base = OTHER; note = 2'-fluoroadenosine-3'-phosphate
  modified_base 6: mod_base = OTHER; note = 2'-O-methyluridine-3'-phosphate
  modified_base 7: mod_base = OTHER; note = 2'-fluorocytidine-3'-phosphate
  modified_base 8: mod_base = OTHER; note = 2'-O-methylcytidine-3'-phosphate
  modified_base 9: mod_base = OTHER; note = 2'-fluoroadenosine-3'-phosphate
  modified_base 10: mod_base = OTHER; note = 2'-O-methylcytidine-3'-phosphate
  modified_base 11: mod_base = OTHER; note = 2'-fluorocytidine-3'-phosphate
  modified_base 12: mod_base = OTHER; note = 2'-O-methyluridine-3'-phosphate
  modified_base 13: mod_base = OTHER; note = 2'-fluorouridine-3'-phosphate
  modified_base 14: mod_base = OTHER; note = 2'-O-methylcytidine-3'-phosphate
  modified_base 15: mod_base = OTHER; note = 2'-fluorocytidine-3'-phosphate
  modified_base 16: mod_base = OTHER; note = 2'-O-methylcytidine-3'-phosphate
  modified_base 17: mod_base = OTHER; note = 2'-fluoroadenosine-3'-phosphorothioate
  modified_base 18: mod_base = OTHER; note = 2'-O-methyluridine-3'-phosphorothioate
  modified_base 19: mod_base = OTHER; note = 2'-fluorocytidine
acggatccaccttcccatc

SEQ ID NO: 622 - RNA, 19 nt, synthetic construct
  source 1..19: mol_type = other RNA
  modified_base 1: mod_base = OTHER; note = 2'-fluorocytidine-3'-phosphorothioate
  modified_base 2: mod_base = OTHER; note = 2'-O-methylguanosine-3'-phosphorothioate
  modified_base 3: mod_base = OTHER; note = 2'-fluoroguanosine-3'-phosphate
  modified_base 4: mod_base = OTHER; note = 2'-O-methyladenosine-3'-phosphate
  modified_base 5: mod_base = OTHER; note = 2'-fluorouridine-3'-phosphate
  modified_base 6: mod_base = OTHER; note = 2'-O-methylcytidine-3'-phosphate
  modified_base 7: mod_base = OTHER; note = 2'-fluorocytidine-3'-phosphate
  modified_base 8: mod_base = OTHER; note = 2'-O-methyladenosine-3'-phosphate
  modified_base 9: mod_base = OTHER; note = 2'-fluorocytidine-3'-phosphate
  modified_base 10: mod_base = OTHER; note = 2'-O-methylcytidine-3'-phosphate
  modified_base 11: mod_base = OTHER; note = 2'-fluorouridine-3'-phosphate
  modified_base 12: mod_base = OTHER; note = 2'-O-methyluridine-3'-phosphate
  modified_base 13: mod_base = OTHER; note = 2'-fluorocytidine-3'-phosphate
  modified_base 14: mod_base = OTHER; note = 2'-O-methylcytidine-3'-phosphate
  modified_base 15: mod_base = OTHER; note = 2'-fluorocytidine-3'-phosphate
  modified_base 16: mod_base = OTHER; note = 2'-O-methyladenosine-3'-phosphate
  modified_base 17: mod_base = OTHER; note = 2'-fluorouridine-3'-phosphorothioate
  modified_base 18: mod_base = OTHER; note = 2'-O-methylcytidine-3'-phosphorothioate
  modified_base 19: mod_base = OTHER; note = 2'-fluorouridine
cggatccaccttcccatct

SEQ ID NO: 623 - RNA, 19 nt, synthetic construct
  source 1..19: mol_type = other RNA
  modified_base 1: mod_base = OTHER; note = 2'-fluoroguanosine-3'-phosphorothioate
  modified_base 2: mod_base = OTHER; note = 2'-O-methylguanosine-3'-phosphorothioate
  modified_base 3: mod_base = OTHER; note = 2'-fluoroadenosine-3'-phosphate
  modified_base 4: mod_base = OTHER; note = 2'-O-methyluridine-3'-phosphate
  modified_base 5: mod_base = OTHER; note = 2'-fluorocytidine-3'-phosphate
  modified_base 6: mod_base = OTHER; note = 2'-O-methylcytidine-3'-phosphate
  modified_base 7: mod_base = OTHER; note = 2'-fluoroadenosine-3'-phosphate
  modified_base 8: mod_base = OTHER; note = 2'-O-methylcytidine-3'-phosphate
  modified_base 9: mod_base = OTHER; note = 2'-fluorocytidine-3'-phosphate
  modified_base 10: mod_base = OTHER; note = 2'-O-methyluridine-3'-phosphate
  modified_base 11: mod_base = OTHER; note = 2'-fluorouridine-3'-phosphate
  modified_base 12: mod_base = OTHER; note = 2'-O-methylcytidine-3'-phosphate
  modified_base 13: mod_base = OTHER; note = 2'-fluorocytidine-3'-phosphate
  modified_base 14: mod_base = OTHER; note = 2'-O-methylcytidine-3'-phosphate
  modified_base 15: mod_base = OTHER; note = 2'-fluoroadenosine-3'-phosphate
  modified_base 16: mod_base = OTHER; note = 2'-O-methyluridine-3'-phosphate
  modified_base 17: mod_base = OTHER; note = 2'-fluorocytidine-3'-phosphorothioate
  modified_base 18: mod_base = OTHER; note = 2'-O-methyluridine-3'-phosphorothioate
  modified_base 19: mod_base = OTHER; note = 2'-fluoroadenosine
ggatccaccttcccatcta

SEQ ID NO: 624 - RNA, 19 nt, synthetic construct
  source 1..19: mol_type = other RNA
  modified_base 1: mod_base = OTHER; note = 2'-fluoroguanosine-3'-phosphorothioate
  modified_base 2: mod_base = OTHER; note = 2'-O-methyladenosine-3'-phosphorothioate
  modified_base 3: mod_base = OTHER; note = 2'-fluorouridine-3'-phosphate
  modified_base 4: mod_base = OTHER; note = 2'-O-methylcytidine-3'-phosphate
  modified_base 5: mod_base = OTHER; note = 2'-fluorocytidine-3'-phosphate
  modified_base 6: mod_base = OTHER; note = 2'-O-methyladenosine-3'-phosphate
  modified_base 7: mod_base = OTHER; note = 2'-fluorocytidine-3'-phosphate
  modified_base 8: mod_base = OTHER; note = 2'-O-methylcytidine-3'-phosphate
  modified_base 9: mod_base = OTHER; note = 2'-fluorouridine-3'-phosphate
  modified_base 10: mod_base = OTHER; note = 2'-O-methyluridine-3'-phosphate
  modified_base 11: mod_base = OTHER; note = 2'-fluorocytidine-3'-phosphate
  modified_base 12: mod_base = OTHER; note = 2'-O-methylcytidine-3'-phosphate
  modified_base 13: mod_base = OTHER; note = 2'-fluorocytidine-3'-phosphate
  modified_base 14: mod_base = OTHER; note = 2'-O-methyladenosine-3'-phosphate
  modified_base 15: mod_base = OTHER; note = 2'-fluorouridine-3'-phosphate
  modified_base 16: mod_base = OTHER; note = 2'-O-methylcytidine-3'-phosphate
  modified_base 17: mod_base = OTHER; note = 2'-fluorouridine-3'-phosphorothioate
  modified_base 18: mod_base = OTHER; note = 2'-O-methyladenosine-3'-phosphorothioate
  modified_base 19: mod_base = OTHER; note = 2'-fluorouridine
gatccaccttcccatctat

SEQ ID NO: 625 - RNA, 19 nt, synthetic construct
  source 1..19: mol_type = other RNA
  modified_base 1: mod_base = OTHER; note = 2'-fluoroadenosine-3'-phosphorothioate
  modified_base 2: mod_base = OTHER; note = 2'-O-methyluridine-3'-phosphorothioate
  modified_base 3: mod_base = OTHER; note = 2'-fluorocytidine-3'-phosphate
  modified_base 4: mod_base = OTHER; note = 2'-O-methylcytidine-3'-phosphate
  modified_base 5: mod_base = OTHER; note = 2'-fluoroadenosine-3'-phosphate
  modified_base 6: mod_base = OTHER; note = 2'-O-methylcytidine-3'-phosphate
  modified_base 7: mod_base = OTHER; note = 2'-fluorocytidine-3'-phosphate
  modified_base 8: mod_base = OTHER; note = 2'-O-methyluridine-3'-phosphate
  modified_base 9: mod_base = OTHER; note = 2'-fluorouridine-3'-phosphate
  modified_base 10: mod_base = OTHER; note = 2'-O-methylcytidine-3'-phosphate
  modified_base 11: mod_base = OTHER; note = 2'-fluorocytidine-3'-phosphate
  modified_base 12: mod_base = OTHER; note = 2'-O-methylcytidine-3'-phosphate
  modified_base 13: mod_base = OTHER; note = 2'-fluoroadenosine-3'-phosphate
  modified_base 14: mod_base = OTHER; note = 2'-O-methyluridine-3'-phosphate
  modified_base 15: mod_base = OTHER; note = 2'-fluorocytidine-3'-phosphate
  modified_base 16: mod_base = OTHER; note = 2'-O-methyluridine-3'-phosphate
  modified_base 17: mod_base = OTHER; note = 2'-fluoroadenosine-3'-phosphorothioate
  modified_base 18: mod_base = OTHER; note = 2'-O-methylguanosine-3'-phosphorothioate
  modified_base 19: mod_base = OTHER; note = 2'-fluoroadenosine
atccaccttcccatctaga

SEQ ID NO: 626 - RNA, 19 nt, synthetic construct
  source 1..19: mol_type = other RNA
  modified_base 1: mod_base = OTHER; note = 2'-fluorouridine-3'-phosphorothioate
  modified_base 2: mod_base = OTHER; note = 2'-O-methylcytidine-3'-phosphorothioate
  modified_base 3: mod_base = OTHER; note = 2'-fluorocytidine-3'-phosphate
  modified_base 4: mod_base = OTHER; note = 2'-O-methyladenosine-3'-phosphate
  modified_base 5: mod_base = OTHER; note = 2'-fluorocytidine-3'-phosphate
  modified_base 6: mod_base = OTHER; note = 2'-O-methylcytidine-3'-phosphate
  modified_base 7: mod_base = OTHER; note = 2'-fluorouridine-3'-phosphate
  modified_base 8: mod_base = OTHER; note = 2'-O-methyluridine-3'-phosphate
  modified_base 9: mod_base = OTHER; note = 2'-fluorocytidine-3'-phosphate
  modified_base 10: mod_base = OTHER; note = 2'-O-methylcytidine-3'-phosphate
  modified_base 11: mod_base = OTHER; note = 2'-fluorocytidine-3'-phosphate
  modified_base 12: mod_base = OTHER; note = 2'-O-methyladenosine-3'-phosphate
  modified_base 13: mod_base = OTHER; note = 2'-fluorouridine-3'-phosphate
  modified_base 14: mod_base = OTHER; note = 2'-O-methylcytidine-3'-phosphate
  modified_base 15: mod_base = OTHER; note = 2'-fluorouridine-3'-phosphate
  modified_base 16: mod_base = OTHER; note = 2'-O-methyladenosine-3'-phosphate
  modified_base 17: mod_base = OTHER; note = 2'-fluoroguanosine-3'-phosphorothioate
  modified_base 18: mod_base = OTHER; note = 2'-O-methyladenosine-3'-phosphorothioate
  modified_base 19: mod_base = OTHER; note = 2'-fluorouridine
tccaccttcccatctagat

SEQ ID NO: 627 - RNA, 19 nt, synthetic construct
  source 1..19: mol_type = other RNA
  modified_base 1: mod_base = OTHER; note = 2'-fluorocytidine-3'-phosphorothioate
  modified_base 2: mod_base = OTHER; note = 2'-O-methylcytidine-3'-phosphorothioate
  modified_base 3: mod_base = OTHER; note = 2'-fluoroadenosine-3'-phosphate
  modified_base 4: mod_base = OTHER; note = 2'-O-methylcytidine-3'-phosphate
  modified_base 5: mod_base = OTHER; note = 2'-fluorocytidine-3'-phosphate
  modified_base 6: mod_base = OTHER; note = 2'-O-methyluridine-3'-phosphate
  modified_base 7: mod_base = OTHER; note = 2'-fluorouridine-3'-phosphate
  modified_base 8: mod_base = OTHER; note = 2'-O-methylcytidine-3'-phosphate
  modified_base 9: mod_base = OTHER; note = 2'-fluorocytidine-3'-phosphate
  modified_base 10: mod_base = OTHER; note = 2'-O-methylcytidine-3'-phosphate
  modified_base 11: mod_base = OTHER; note = 2'-fluoroadenosine-3'-phosphate
  modified_base 12: mod_base = OTHER; note = 2'-O-methyluridine-3'-phosphate
  modified_base 13: mod_base = OTHER; note = 2'-fluorocytidine-3'-phosphate
  modified_base 14: mod_base = OTHER; note = 2'-O-methyluridine-3'-phosphate
  modified_base 15: mod_base = OTHER; note = 2'-fluoroadenosine-3'-phosphate
  modified_base 16: mod_base = OTHER; note = 2'-O-methylguanosine-3'-phosphate
  modified_base 17: mod_base = OTHER; note = 2'-fluoroadenosine-3'-phosphorothioate
  modified_base 18: mod_base = OTHER; note = 2'-O-methyluridine-3'-phosphorothioate
  modified_base 19: mod_base = OTHER; note = 2'-fluorouridine
ccaccttcccatctagatt

SEQ ID NO: 628 - RNA, 19 nt, synthetic construct
  source 1..19: mol_type = other RNA
  modified_base 1: mod_base = OTHER; note = 2'-fluoroadenosine-3'-phosphorothioate
  modified_base 2: mod_base = OTHER; note = 2'-O-methylcytidine-3'-phosphorothioate
  modified_base 3: mod_base = OTHER; note = 2'-fluorocytidine-3'-phosphate
  modified_base 4: mod_base = OTHER; note = 2'-O-methyluridine-3'-phosphate
  modified_base 5: mod_base = OTHER; note = 2'-fluoroguanosine-3'-phosphate
  modified_base 6: mod_base = OTHER; note = 2'-O-methylcytidine-3'-phosphate
  modified_base 7: mod_base = OTHER; note = 2'-fluorouridine-3'-phosphate
  modified_base 8: mod_base = OTHER; note = 2'-O-methylguanosine-3'-phosphate
  modified_base 9: mod_base = OTHER; note = 2'-fluorocytidine-3'-phosphate
  modified_base 10: mod_base = OTHER; note = 2'-O-methyluridine-3'-phosphate
  modified_base 11: mod_base = OTHER; note = 2'-fluorocytidine-3'-phosphate
  modified_base 12: mod_base = OTHER; note = 2'-O-methylcytidine-3'-phosphate
  modified_base 13: mod_base = OTHER; note = 2'-fluorocytidine-3'-phosphate
  modified_base 14: mod_base = OTHER; note = 2'-O-methyluridine-3'-phosphate
  modified_base 15: mod_base = OTHER; note = 2'-fluoroguanosine-3'-phosphate
  modified_base 16: mod_base = OTHER; note = 2'-O-methylcytidine-3'-phosphate
  modified_base 17: mod_base = OTHER; note = 2'-fluorocytidine-3'-phosphorothioate
  modified_base 18: mod_base = OTHER; note = 2'-O-methyladenosine-3'-phosphorothioate
  modified_base 19: mod_base = OTHER; note = 2'-fluorouridine
acctgctgctccctgccat

SEQ ID NO: 629 - RNA, 19 nt, synthetic construct
  source 1..19: mol_type = other RNA
  modified_base 1: mod_base = OTHER; note = 2'-fluorouridine-3'-phosphorothioate
  modified_base 2: mod_base = OTHER; note = 2'-O-methylcytidine-3'-phosphorothioate
  modified_base 3: mod_base = OTHER; note = 2'-fluorocytidine-3'-phosphate
  modified_base 4: mod_base = OTHER; note = 2'-O-methylcytidine-3'-phosphate
  modified_base 5: mod_base = OTHER; note = 2'-fluorouridine-3'-phosphate
  modified_base 6: mod_base = OTHER; note = 2'-O-methyladenosine-3'-phosphate
  modified_base 7: mod_base = OTHER; note = 2'-fluoroguanosine-3'-phosphate
  modified_base 8: mod_base = OTHER; note = 2'-O-methylguanosine-3'-phosphate
  modified_base 9: mod_base = OTHER; note = 2'-fluorocytidine-3'-phosphate
  modified_base 10: mod_base = OTHER; note = 2'-O-methylcytidine-3'-phosphate
  modified_base 11: mod_base = OTHER; note = 2'-fluorouridine-3'-phosphate
  modified_base 12: mod_base = OTHER; note = 2'-O-methylguanosine-3'-phosphate
  modified_base 13: mod_base = OTHER; note = 2'-fluoroguanosine-3'-phosphate
  modified_base 14: mod_base = OTHER; note = 2'-O-methylcytidine-3'-phosphate
  modified_base 15: mod_base = OTHER; note = 2'-fluorocytidine-3'-phosphate
  modified_base 16: mod_base = OTHER; note = 2'-O-methyluridine-3'-phosphate
  modified_base 17: mod_base = OTHER; note = 2'-fluoroadenosine-3'-phosphorothioate
  modified_base 18: mod_base = OTHER; note = 2'-O-methyluridine-3'-phosphorothioate
  modified_base 19: mod_base = OTHER; note = 2'-fluorouridine
tccctaggcctggcctatt

SEQ ID NO: 630 - RNA, 19 nt, synthetic construct
  source 1..19: mol_type = other RNA
  modified_base 1: mod_base = OTHER; note = 2'-fluoroadenosine-3'-phosphorothioate
  modified_base 2: mod_base = OTHER; note = 2'-O-methyluridine-3'-phosphorothioate
  modified_base 3: mod_base = OTHER; note = 2'-fluorouridine-3'-phosphate
  modified_base 4: mod_base = OTHER; note = 2'-O-methylcytidine-3'-phosphate
  modified_base 5: mod_base = OTHER; note = 2'-fluorocytidine-3'-phosphate
  modified_base 6: mod_base = OTHER; note = 2'-O-methyluridine-3'-phosphate
  modified_base 7: mod_base = OTHER; note = 2'-fluorocytidine-3'-phosphate
  modified_base 8: mod_base = OTHER; note = 2'-O-methylguanosine-3'-phosphate
  modified_base 9: mod_base = OTHER; note = 2'-fluoroguanosine-3'-phosphate
  modified_base 10: mod_base = OTHER; note = 2'-O-methyluridine-3'-phosphate
  modified_base 11: mod_base = OTHER; note = 2'-fluoroadenosine-3'-phosphate
  modified_base 12: mod_base = OTHER; note = 2'-O-methyluridine-3'-phosphate
  modified_base 13: mod_base = OTHER; note = 2'-fluorouridine-3'-phosphate
  modified_base 14: mod_base = OTHER; note = 2'-O-methyluridine-3'-phosphate
  modified_base 15: mod_base = OTHER; note = 2'-fluoroadenosine-3'-phosphate
  modified_base 16: mod_base = OTHER; note = 2'-O-methyluridine-3'-phosphate
  modified_base 17: mod_base = OTHER; note = 2'-fluorouridine-3'-phosphorothioate
  modified_base 18: mod_base = OTHER; note = 2'-O-methylguanosine-3'-phosphorothioate
  modified_base 19: mod_base = OTHER; note = 2'-fluorouridine
attcctcggtatttattgt

SEQ ID NO: 631 - RNA, 19 nt, synthetic construct
  source 1..19: mol_type = other RNA
  modified_base 1: mod_base = OTHER; note = 2'-fluorouridine-3'-phosphorothioate
  modified_base 2: mod_base = OTHER; note = 2'-O-methyluridine-3'-phosphorothioate
  modified_base 3: mod_base = OTHER; note = 2'-fluorocytidine-3'-phosphate
  modified_base 4: mod_base = OTHER; note = 2'-O-methylcytidine-3'-phosphate
  modified_base 5: mod_base = OTHER; note = 2'-fluorouridine-3'-phosphate
  modified_base 6: mod_base = OTHER; note = 2'-O-methylcytidine-3'-phosphate
  modified_base 7: mod_base = OTHER; note = 2'-fluoroguanosine-3'-phosphate
  modified_base 8: mod_base = OTHER; note = 2'-O-methylguanosine-3'-phosphate
  modified_base 9: mod_base = OTHER; note = 2'-fluorouridine-3'-phosphate
  modified_base 10: mod_base = OTHER; note = 2'-O-methyladenosine-3'-phosphate
  modified_base 11: mod_base = OTHER; note = 2'-fluorouridine-3'-phosphate
  modified_base 12: mod_base = OTHER; note = 2'-O-methyluridine-3'-phosphate
  modified_base 13: mod_base = OTHER; note = 2'-fluorouridine-3'-phosphate
  modified_base 14: mod_base = OTHER; note = 2'-O-methyladenosine-3'-phosphate
  modified_base 15: mod_base = OTHER; note = 2'-fluorouridine-3'-phosphate
  modified_base 16: mod_base = OTHER; note = 2'-O-methyluridine-3'-phosphate
  modified_base 17: mod_base = OTHER; note = 2'-fluoroguanosine-3'-phosphorothioate
  modified_base 18: mod_base = OTHER; note = 2'-O-methyluridine-3'-phosphorothioate
  modified_base 19: mod_base = OTHER; note = 2'-fluorouridine
ttcctcggtatttattgtt

SEQ ID NO: 632 - RNA, 19 nt, synthetic construct
  source 1..19: mol_type = other RNA
  modified_base 1: mod_base = OTHER; note = 2'-fluorocytidine-3'-phosphorothioate
  modified_base 2: mod_base = OTHER; note = 2'-O-methyluridine-3'-phosphorothioate
  modified_base 3: mod_base = OTHER; note = 2'-fluorocytidine-3'-phosphate
  modified_base 4: mod_base = OTHER; note = 2'-O-methylguanosine-3'-phosphate
  modified_base 5: mod_base = OTHER; note = 2'-fluoroguanosine-3'-phosphate
  modified_base 6: mod_base = OTHER; note = 2'-O-methyluridine-3'-phosphate
  modified_base 7: mod_base = OTHER; note = 2'-fluoroadenosine-3'-phosphate
  modified_base 8: mod_base = OTHER; note = 2'-O-methyluridine-3'-phosphate
  modified_base 9: mod_base = OTHER; note = 2'-fluorouridine-3'-phosphate
  modified_base 10: mod_base = OTHER; note = 2'-O-methyluridine-3'-phosphate
  modified_base 11: mod_base = OTHER; note = 2'-fluoroadenosine-3'-phosphate
  modified_base 12: mod_base = OTHER; note = 2'-O-methyluridine-3'-phosphate
  modified_base 13: mod_base = OTHER; note = 2'-fluorouridine-3'-phosphate
  modified_base 14: mod_base = OTHER; note = 2'-O-methylguanosine-3'-phosphate
  modified_base 15: mod_base = OTHER; note = 2'-fluorouridine-3'-phosphate
  modified_base 16: mod_base = OTHER; note = 2'-O-methylcytidine-3'-phosphate
  modified_base 17: mod_base = OTHER; note = 2'-fluorouridine-3'-phosphorothioate
  modified_base 18: mod_base = OTHER; note = 2'-O-methylguanosine-3'-phosphorothioate
  modified_base 19: mod_base = OTHER; note = 2'-fluorouridine
ctcggtatttattgtctgt

SEQ ID NO: 633 - RNA, 19 nt, synthetic construct
  source 1..19: mol_type = other RNA
  modified_base 1: mod_base = OTHER; note = 2'-fluorouridine-3'-phosphorothioate
  modified_base 2: mod_base = OTHER; note = 2'-O-methylcytidine-3'-phosphorothioate
  modified_base 3: mod_base = OTHER; note = 2'-fluoroguanosine-3'-phosphate
  modified_base 4: mod_base = OTHER; note = 2'-O-methylguanosine-3'-phosphate
  modified_base 5: mod_base = OTHER; note = 2'-fluorouridine-3'-phosphate
  modified_base 6: mod_base = OTHER; note = 2'-O-methyladenosine-3'-phosphate
  modified_base 7: mod_base = OTHER; note = 2'-fluorouridine-3'-phosphate
  modified_base 8: mod_base = OTHER; note = 2'-O-methyluridine-3'-phosphate
  modified_base 9: mod_base = OTHER; note = 2'-fluorouridine-3'-phosphate
  modified_base 10: mod_base = OTHER; note = 2'-O-methyladenosine-3'-phosphate
  modified_base 11: mod_base = OTHER; note = 2'-fluorouridine-3'-phosphate
  modified_base 12: mod_base = OTHER; note = 2'-O-methyluridine-3'-phosphate
  modified_base 13: mod_base = OTHER; note = 2'-fluoroguanosine-3'-phosphate
  modified_base 14: mod_base = OTHER; note = 2'-O-methyluridine-3'-phosphate
  modified_base 15: mod_base = OTHER; note = 2'-fluorocytidine-3'-phosphate
  modified_base 16: mod_base = OTHER; note = 2'-O-methyluridine-3'-phosphate
  modified_base 17: mod_base = OTHER; note = 2'-fluoroguanosine-3'-phosphorothioate
  modified_base 18: mod_base = OTHER; note = 2'-O-methyluridine-3'-phosphorothioate
  modified_base 19: mod_base = OTHER; note = 2'-fluorouridine
tcggtatttattgtctgtt

SEQ ID NO: 634 - RNA, 19 nt, synthetic construct
  source 1..19: mol_type = other RNA
  modified_base 1: mod_base = OTHER; note = 2'-fluorocytidine-3'-phosphorothioate
  modified_base 2: mod_base = OTHER; note = 2'-O-methylguanosine-3'-phosphorothioate
  modified_base 3: mod_base = OTHER; note = 2'-fluoroguanosine-3'-phosphate
  modified_base 4: mod_base = OTHER; note = 2'-O-methyluridine-3'-phosphate
  modified_base 5: mod_base = OTHER; note = 2'-fluoroadenosine-3'-phosphate
  modified_base 6: mod_base = OTHER; note = 2'-O-methyluridine-3'-phosphate
  modified_base 7: mod_base = OTHER; note = 2'-fluorouridine-3'-phosphate
  modified_base 8: mod_base = OTHER; note = 2'-O-methyluridine-3'-phosphate
  modified_base 9: mod_base = OTHER; note = 2'-fluoroadenosine-3'-phosphate
  modified_base 10: mod_base = OTHER; note = 2'-O-methyluridine-3'-phosphate
  modified_base 11: mod_base = OTHER; note = 2'-fluorouridine-3'-phosphate
  modified_base 12: mod_base = OTHER; note = 2'-O-methylguanosine-3'-phosphate
  modified_base 13: mod_base = OTHER; note = 2'-fluorouridine-3'-phosphate
  modified_base 14: mod_base = OTHER; note = 2'-O-methylcytidine-3'-phosphate
  modified_base 15: mod_base = OTHER; note = 2'-fluorouridine-3'-phosphate
  modified_base 16: mod_base = OTHER; note = 2'-O-methylguanosine-3'-phosphate
  modified_base 17: mod_base = OTHER; note = 2'-fluorouridine-3'-phosphorothioate
  modified_base 18: mod_base = OTHER; note = 2'-O-methylcytidine-3'-phosphorothioate
  modified_base 19: mod_base = OTHER; note = 2'-fluorouridine
cggtatttattgtctgtct

SEQ ID NO: 635 - RNA, 19 nt, synthetic construct
  source 1..19: mol_type = other RNA
  modified_base 1: mod_base = OTHER; note = 2'-fluoroguanosine-3'-phosphorothioate
  modified_base 2: mod_base = OTHER; note = 2'-O-methylcytidine-3'-phosphorothioate
  modified_base 3: mod_base = OTHER; note = 2'-fluoroguanosine-3'-phosphate
  modified_base 4: mod_base = OTHER; note = 2'-O-methylguanosine-3'-phosphate
  modified_base 5: mod_base = OTHER; note = 2'-fluoroadenosine-3'-phosphate
  modified_base 6: mod_base = OTHER; note = 2'-O-methylguanosine-3'-phosphate
  modified_base 7: mod_base = OTHER; note = 2'-fluorocytidine-3'-phosphate
  modified_base 8: mod_base = OTHER; note = 2'-O-methylcytidine-3'-phosphate
  modified_base 9: mod_base = OTHER; note = 2'-fluorocytidine-3'-phosphate
  modified_base 10: mod_base = OTHER; note = 2'-O-methyladenosine-3'-phosphate
  modified_base 11: mod_base = OTHER; note = 2'-fluorouridine-3'-phosphate
  modified_base 12: mod_base = OTHER; note = 2'-O-methylcytidine-3'-phosphate
  modified_base 13: mod_base = OTHER; note = 2'-fluoroguanosine-3'-phosphate
  modified_base 14: mod_base = OTHER; note = 2'-O-methyluridine-3'-phosphate
  modified_base 15: mod_base = OTHER; note = 2'-fluoroguanosine-3'-phosphate
  modified_base 16: mod_base = OTHER; note = 2'-O-methylguanosine-3'-phosphate
  modified_base 17: mod_base = OTHER; note = 2'-fluorouridine-3'-phosphorothioate
  modified_base 18: mod_base = OTHER; note = 2'-O-methylguanosine-3'-phosphorothioate
  modified_base 19: mod_base = OTHER; note = 2'-fluoroadenosine
gcggagcccatcgtggtga

SEQ ID NO: 636 - RNA, 19 nt, synthetic construct
  source 1..19: mol_type = other RNA
  modified_base 1: mod_base = OTHER; note = 2'-fluorocytidine-3'-phosphorothioate
  modified_base 2: mod_base = OTHER; note = 2'-O-methylguanosine-3'-phosphorothioate
  modified_base 3: mod_base = OTHER; note = 2'-fluoroguanosine-3'-phosphate
  modified_base 4: mod_base = OTHER; note = 2'-O-methyladenosine-3'-phosphate
  modified_base 5: mod_base = OTHER; note = 2'-fluoroguanosine-3'-phosphate
  modified_base 6: mod_base = OTHER; note = 2'-O-methylcytidine-3'-phosphate
  modified_base 7: mod_base = OTHER; note = 2'-fluorocytidine-3'-phosphate
  modified_base 8: mod_base = OTHER; note = 2'-O-methylcytidine-3'-phosphate
  modified_base 9: mod_base = OTHER; note = 2'-fluoroadenosine-3'-phosphate
  modified_base 10: mod_base = OTHER; note = 2'-O-methyluridine-3'-phosphate
  modified_base 11: mod_base = OTHER; note = 2'-fluorocytidine-3'-phosphate
  modified_base 12: mod_base = OTHER; note = 2'-O-methylguanosine-3'-phosphate
  modified_base 13: mod_base = OTHER; note = 2'-fluorouridine-3'-phosphate
  modified_base 14: mod_base = OTHER; note = 2'-O-methylguanosine-3'-phosphate
  modified_base 15: mod_base = OTHER; note = 2'-fluoroguanosine-3'-phosphate
  modified_base 16: mod_base = OTHER; note = 2'-O-methyluridine-3'-phosphate
  modified_base 17: mod_base = OTHER; note = 2'-fluoroguanosine-3'-phosphorothioate
  modified_base 18: mod_base = OTHER; note = 2'-O-methyladenosine-3'-phosphorothioate
  modified_base 19: mod_base = OTHER; note = 2'-fluorouridine
cggagcccatcgtggtgat

SEQ ID NO: 637 - RNA, 19 nt, synthetic construct
  source 1..19: mol_type = other RNA
  modified_base 1: mod_base = OTHER; note = 2'-fluoroguanosine-3'-phosphorothioate
  modified_base 2: mod_base = OTHER; note = 2'-O-methylcytidine-3'-phosphorothioate
  modified_base 3: mod_base = OTHER; note = 2'-fluorocytidine-3'-phosphate
  modified_base 4: mod_base = OTHER; note = 2'-O-methylcytidine-3'-phosphate
  modified_base 5: mod_base = OTHER; note = 2'-fluoroadenosine-3'-phosphate
  modified_base 6: mod_base = OTHER; note = 2'-O-methyluridine-3'-phosphate
  modified_base 7: mod_base = OTHER; note = 2'-fluorocytidine-3'-phosphate
  modified_base 8: mod_base = OTHER; note = 2'-O-methylguanosine-3'-phosphate
  modified_base 9: mod_base = OTHER; note = 2'-fluorouridine-3'-phosphate
  modified_base 10: mod_base = OTHER; note = 2'-O-methylguanosine-3'-phosphate
  modified_base 11: mod_base = OTHER; note = 2'-fluoroguanosine-3'-phosphate
  modified_base 12: mod_base = OTHER; note = 2'-O-methyluridine-3'-phosphate
  modified_base 13: mod_base = OTHER; note = 2'-fluoroguanosine-3'-phosphate
  modified_base 14: mod_base = OTHER; note = 2'-O-methyladenosine-3'-phosphate
  modified_base 15: mod_base = OTHER; note = 2'-fluoroguanosine-3'-phosphate
  modified_base 16: mod_base = OTHER; note = 2'-O-methylguanosine-3'-phosphate
  modified_base 17: mod_base = OTHER; note = 2'-O-methylcytidine-3'-phosphorothioate
  modified_base 18: mod_base = OTHER; note = 2'-O-methyluridine-3'-phosphorothioate
  modified_base 19: mod_base = OTHER; note = 2'-fluorouridine
gcccatcgtggtgaggctt

SEQ ID NO: 638 - RNA, 19 nt, synthetic construct
  source 1..19: mol_type = other RNA
  modified_base 1: mod_base = OTHER; note = 2'-fluorocytidine-3'-phosphorothioate
  modified_base 2: mod_base = OTHER; note = 2'-O-methylcytidine-3'-phosphorothioate
  modified_base 3: mod_base = OTHER; note = 2'-fluorocytidine-3'-phosphate
  modified_base 4: mod_base = OTHER; note = 2'-O-methyladenosine-3'-phosphate
  modified_base 5: mod_base = OTHER; note = 2'-fluorouridine-3'-phosphate
  modified_base 6: mod_base = OTHER; note = 2'-O-methylcytidine-3'-phosphate
  modified_base 7: mod_base = OTHER; note = 2'-fluoroguanosine-3'-phosphate
  modified_base 8: mod_base = OTHER; note = 2'-O-methyluridine-3'-phosphate
  modified_base 9: mod_base = OTHER; note = 2'-fluoroguanosine-3'-phosphate
  modified_base 10: mod_base = OTHER; note = 2'-O-methylguanosine-3'-phosphate
  modified_base 11: mod_base = OTHER; note = 2'-fluorouridine-3'-phosphate
  modified_base 12: mod_base = OTHER; note = 2'-O-methylguanosine-3'-phosphate
  modified_base 13: mod_base = OTHER; note = 2'-fluoroadenosine-3'-phosphate
  modified_base 14: mod_base = OTHER; note = 2'-O-methylguanosine-3'-phosphate
  modified_base 15: mod_base = OTHER; note = 2'-fluoroguanosine-3'-phosphate
  modified_base 16: mod_base = OTHER; note = 2'-O-methylcytidine-3'-phosphate
  modified_base 17: mod_base = OTHER; note = 2'-fluorouridine-3'-phosphorothioate
  modified_base 18: mod_base = OTHER; note = 2'-O-methyluridine-3'-phosphorothioate
  modified_base 19: mod_base = OTHER; note = 2'-fluoroadenosine
cccatcgtggtgaggctta

SEQ ID NO: 639 - RNA, 19 nt, synthetic construct
  source 1..19: mol_type = other RNA
  modified_base 1: mod_base = OTHER; note = 2'-fluorocytidine-3'-phosphorothioate
  modified_base 2: mod_base = OTHER; note = 2'-O-methylcytidine-3'-phosphorothioate
  modified_base 3: mod_base = OTHER; note = 2'-fluoroadenosine-3'-phosphate
  modified_base 4: mod_base = OTHER; note = 2'-O-methyluridine-3'-phosphate
  modified_base 5: mod_base = OTHER; note = 2'-fluorocytidine-3'-phosphate
  modified_base 6: mod_base = OTHER; note = 2'-O-methylguanosine-3'-phosphate
  modified_base 7: mod_base = OTHER; note = 2'-fluorouridine-3'-phosphate
  modified_base 8: mod_base = OTHER; note = 2'-O-methylguanosine-3'-phosphate
  modified_base 9: mod_base = OTHER; note = 2'-fluoroguanosine-3'-phosphate
  modified_base 10: mod_base = OTHER; note = 2'-O-methyluridine-3'-phosphate
  modified_base 11: mod_base = OTHER; note = 2'-fluoroguanosine-3'-phosphate
  modified_base 12: mod_base = OTHER; note = 2'-O-methyladenosine-3'-phosphate
  modified_base 13: mod_base = OTHER; note = 2'-fluoroguanosine-3'-phosphate
  modified_base 14: mod_base = OTHER; note = 2'-O-methylguanosine-3'-phosphate
  modified_base 15: mod_base = OTHER; note = 2'-fluorocytidine-3'-phosphate
  modified_base 16: mod_base = OTHER; note = 2'-O-methyluridine-3'-phosphate
  modified_base 17: mod_base = OTHER; note = 2'-fluorouridine-3'-phosphorothioate
  modified_base 18: mod_base = OTHER; note = 2'-O-methyladenosine-3'-phosphorothioate
  modified_base 19: mod_base = OTHER; note = 2'-fluoroadenosine
ccatcgtggtgaggcttaa

SEQ ID NO: 640 - RNA, 19 nt, synthetic construct
  source 1..19: mol_type = other RNA
  modified_base 1: mod_base = OTHER; note = 2'-fluorocytidine-3'-phosphorothioate
  modified_base 2: mod_base = OTHER; note = 2'-O-methyladenosine-3'-phosphorothioate
  modified_base 3: mod_base = OTHER; note = 2'-fluorouridine-3'-phosphate
  modified_base 4: mod_base = OTHER; note = 2'-O-methylcytidine-3'-phosphate
  modified_base 5: mod_base = OTHER; note = 2'-fluoroguanosine-3'-phosphate
  modified_base 6: mod_base = OTHER; note = 2'-O-methyluridine-3'-phosphate
  modified_base 7: mod_base = OTHER; note = 2'-fluoroguanosine-3'-phosphate
  modified_base 8: mod_base = OTHER; note = 2'-O-methylguanosine-3'-phosphate
  modified_base 9: mod_base = OTHER; note = 2'-fluorouridine-3'-phosphate
  modified_base 10: mod_base = OTHER; note = 2'-O-methylguanosine-3'-phosphate
  modified_base 11: mod_base = OTHER; note = 2'-fluoroadenosine-3'-phosphate
  modified_base 12: mod_base = OTHER; note = 2'-O-methylguanosine-3'-phosphate
  modified_base 13: mod_base = OTHER; note = 2'-fluoroguanosine-3'-phosphate
  modified_base 14: mod_base = OTHER; note = 2'-O-methylcytidine-3'-phosphate
  modified_base 15: mod_base = OTHER; note = 2'-fluorouridine-3'-phosphate
  modified_base 16: mod_base = OTHER; note = 2'-O-methyluridine-3'-phosphate
  modified_base 17: mod_base = OTHER; note = 2'-fluoroadenosine-3'-phosphorothioate
  modified_base 18: mod_base = OTHER; note = 2'-O-methyladenosine-3'-phosphorothioate
  modified_base 19: mod_base = OTHER; note = 2'-fluorouridine
catcgtggtgaggcttaat

SEQ ID NO: 641 - RNA, 19 nt, synthetic construct
  source 1..19: mol_type = other RNA
  modified_base 1: mod_base = OTHER; note = 2'-fluorocytidine-3'-phosphorothioate
  modified_base 2: mod_base = OTHER; note = 2'-O-methylguanosine-3'-phosphorothioate
  modified_base 3: mod_base = OTHER; note = 2'-fluorouridine-3'-phosphate
  modified_base 4: mod_base = OTHER; note = 2'-O-methylguanosine-3'-phosphate
  modified_base 5: mod_base = OTHER; note = 2'-fluoroguanosine-3'-phosphate
  modified_base 6: mod_base = OTHER; note = 2'-O-methyluridine-3'-phosphate
  modified_base 7: mod_base = OTHER; note = 2'-fluoroguanosine-3'-phosphate
  modified_base 8: mod_base = OTHER; note = 2'-O-methyladenosine-3'-phosphate
  modified_base 9: mod_base = OTHER; note = 2'-fluoroguanosine-3'-phosphate
  modified_base 10: mod_base = OTHER; note = 2'-O-methylguanosine-3'-phosphate
  modified_base 11: mod_base = OTHER; note = 2'-fluorocytidine-3'-phosphate
  modified_base 12: mod_base = OTHER; note = 2'-O-methyluridine-3'-phosphate
  modified_base 13: mod_base = OTHER; note = 2'-fluorouridine-3'-phosphate
  modified_base 14: mod_base = OTHER; note = 2'-O-methyladenosine-3'-phosphate
  modified_base 15: mod_base = OTHER; note = 2'-fluoroadenosine-3'-phosphate
  modified_base 16: mod_base = OTHER; note = 2'-O-methylguanosine-3'-phosphate
  modified_base 17: mod_base = OTHER; note = 2'-fluoroguanosine-3'-phosphorothioate
  modified_base 18: mod_base = OTHER; note = 2'-O-methyladenosine-3'-phosphorothioate
  modified_base 19: mod_base = OTHER; note = 2'-fluorouridine
cgtggtgaggcttaaggat

SEQ ID NO: 642 - RNA, 19 nt, synthetic construct
  source 1..19: mol_type = other RNA
  modified_base 1: mod_base = OTHER; note = 2'-fluoroguanosine-3'-phosphorothioate
  modified_base 2: mod_base = OTHER; note = 2'-O-methylguanosine-3'-phosphorothioate
  modified_base 3: mod_base = OTHER; note = 2'-fluorouridine-3'-phosphate
  modified_base 4: mod_base = OTHER; note = 2'-O-methylguanosine-3'-phosphate
  modified_base 5: mod_base = OTHER; note = 2'-fluoroadenosine-3'-phosphate
  modified_base 6: mod_base = OTHER; note = 2'-O-methylguanosine-3'-phosphate
  modified_base 7: mod_base = OTHER; note = 2'-fluoroguanosine-3'-phosphate
  modified_base 8: mod_base = OTHER; note = 2'-O-methylcytidine-3'-phosphate
  modified_base 9: mod_base = OTHER; note = 2'-fluorouridine-3'-phosphate
  modified_base 10: mod_base = OTHER; note = 2'-O-methyluridine-3'-phosphate
  modified_base 11: mod_base = OTHER; note = 2'-fluoroadenosine-3'-phosphate
  modified_base 12: mod_base = OTHER; note = 2'-O-methyladenosine-3'-phosphate
  modified_base 13: mod_base = OTHER; note = 2'-fluoroguanosine-3'-phosphate
  modified_base 14: mod_base = OTHER; note = 2'-O-methylguanosine-3'-phosphate
  modified_base 15: mod_base = OTHER; note = 2'-fluoroadenosine-3'-phosphate
  modified_base 16: mod_base = OTHER; note = 2'-O-methylguanosine-3'-phosphate
  modified_base 17: mod_base = OTHER; note = 2'-fluoroguanosine-3'-phosphorothioate
  modified_base 18: mod_base = OTHER; note = 2'-O-methyluridine-3'-phosphorothioate
  modified_base 19: mod_base = OTHER; note = 2'-fluorouridine
ggtgaggcttaaggaggtt

SEQ ID NO: 643 - RNA, 19 nt, synthetic construct
  source 1..19: mol_type = other RNA
  modified_base 1: mod_base = OTHER; note = 2'-fluoroadenosine-3'-phosphorothioate
  modified_base 2: mod_base = OTHER; note = 2'-O-methylguanosine-3'-phosphorothioate
  modified_base 3: mod_base = OTHER; note = 2'-fluoroguanosine-3'-phosphate
  modified_base 4: mod_base = OTHER; note = 2'-O-methylguanosine-3'-phosphate
  modified_base 5: mod_base = OTHER; note = 2'-fluoroadenosine-3'-phosphate
  modified_base 6: mod_base = OTHER; note = 2'-O-methylcytidine-3'-phosphate
  modified_base 7: mod_base = OTHER; note = 2'-fluoroguanosine-3'-phosphate
  modified_base 8: mod_base = OTHER; note = 2'-O-methyladenosine-3'-phosphate
  modified_base 9: mod_base = OTHER; note = 2'-fluorocytidine-3'-phosphate
  modified_base 10: mod_base = OTHER; note = 2'-O-methyluridine-3'-phosphate
  modified_base 11: mod_base = OTHER; note = 2'-fluorouridine-3'-phosphate
  modified_base 12: mod_base = OTHER; note = 2'-O-methylcytidine-3'-phosphate
  modified_base 13: mod_base = OTHER; note = 2'-fluoroguanosine-3'-phosphate
  modified_base 14: mod_base = OTHER; note = 2'-O-methyladenosine-3'-phosphate
  modified_base 15: mod_base = OTHER; note = 2'-fluoroguanosine-3'-phosphate
  modified_base 16: mod_base = OTHER; note = 2'-O-methyladenosine-3'-phosphate
  modified_base 17: mod_base = OTHER; note = 2'-fluorouridine-3'-phosphorothioate
  modified_base 18: mod_base = OTHER; note = 2'-O-methyluridine-3'-phosphorothioate
  modified_base 19: mod_base = OTHER; note = 2'-fluorouridine
agggacgacttcgagattt

SEQ ID NO: 644 - RNA, 19 nt, synthetic construct
  source 1..19: mol_type = other RNA
  modified_base 1: mod_base = OTHER; note = 2'-fluoroguanosine-3'-phosphorothioate
  modified_base 2: mod_base = OTHER; note = 2'-O-methylguanosine-3'-phosphorothioate
  modified_base 3: mod_base = OTHER; note = 2'-fluoroadenosine-3'-phosphate
  modified_base 4: mod_base = OTHER; note = 2'-O-methylcytidine-3'-phosphate
  modified_base 5: mod_base = OTHER; note = 2'-fluoroguanosine-3'-phosphate
  modified_base 6: mod_base = OTHER; note = 2'-O-methyladenosine-3'-phosphate
  modified_base 7: mod_base = OTHER; note = 2'-fluorocytidine-3'-phosphate
  modified_base 8: mod_base = OTHER; note = 2'-O-methyluridine-3'-phosphate
  modified_base 9: mod_base = OTHER; note = 2'-fluorouridine-3'-phosphate
  modified_base 10: mod_base = OTHER; note = 2'-O-methylcytidine-3'-phosphate
  modified_base 11: mod_base = OTHER; note = 2'-fluoroguanosine-3'-phosphate
  modified_base 12: mod_base = OTHER; note = 2'-O-methyladenosine-3'-phosphate
  modified_base 13: mod_base = OTHER; note = 2'-fluoroguanosine-3'-phosphate
  modified_base 14: mod_base = OTHER; note = 2'-O-methyladenosine-3'-phosphate
  modified_base 15: mod_base = OTHER; note = 2'-fluorouridine-3'-phosphate
  modified_base 16: mod_base = OTHER; note = 2'-O-methyluridine-3'-phosphate
  modified_base 17: mod_base = OTHER; note = 2'-fluorocytidine-3'-phosphorothioate
  modified_base 18: mod_base = OTHER; note = 2'-O-methyluridine-3'-phosphorothioate
  modified_base 19: mod_base = OTHER; note = 2'-fluorouridine
ggacgacttcgagattctt

SEQ ID NO: 645 - RNA, 19 nt, synthetic construct
  source 1..19: mol_type = other RNA
  modified_base 1: mod_base = OTHER; note = 2'-fluorocytidine-3'-phosphorothioate
  modified_base 2: mod_base = OTHER; note = 2'-O-methylguanosine-3'-phosphorothioate
  modified_base 3: mod_base = OTHER; note = 2'-fluoroadenosine-3'-phosphate
  modified_base 4: mod_base = OTHER; note = 2'-O-methylcytidine-3'-phosphate
  modified_base 5: mod_base = OTHER; note = 2'-fluorouridine-3'-phosphate
  modified_base 6: mod_base = OTHER; note = 2'-O-methyluridine-3'-phosphate
  modified_base 7: mod_base = OTHER; note = 2'-fluorocytidine-3'-phosphate
  modified_base 8: mod_base = OTHER; note = 2'-O-methylguanosine-3'-phosphate
  modified_base 9: mod_base = OTHER; note = 2'-fluoroadenosine-3'-phosphate
  modified_base 10: mod_base = OTHER; note = 2'-O-methylguanosine-3'-phosphate
  modified_base 11: mod_base = OTHER; note = 2'-fluoroadenosine-3'-phosphate
  modified_base 12: mod_base = OTHER; note = 2'-O-methyluridine-3'-phosphate
  modified_base 13: mod_base = OTHER; note = 2'-fluorouridine-3'-phosphate
  modified_base 14: mod_base = OTHER; note = 2'-O-methylcytidine-3'-phosphate
  modified_base 15: mod_base = OTHER; note = 2'-fluorouridine-3'-phosphate
  modified_base 16: mod_base = OTHER; note = 2'-O-methylguanosine-3'-phosphate
  modified_base 17: mod_base = OTHER; note = 2'-fluoroadenosine-3'-phosphorothioate
  modified_base 18: mod_base = OTHER; note = 2'-O-methyladenosine-3'-phosphorothioate
  modified_base 19: mod_base = OTHER; note = 2'-fluorouridine
cgacttcgagattctgaat

SEQ ID NO: 646 - RNA, 19 nt, synthetic construct
  source 1..19: mol_type = other RNA
  modified_base 1: mod_base = OTHER; note = 2'-fluorocytidine-3'-phosphorothioate
  modified_base 2: mod_base = OTHER; note = 2'-O-methylguanosine-3'-phosphorothioate
  modified_base 3: mod_base = OTHER; note = 2'-fluoroadenosine-3'-phosphate
  modified_base 4: mod_base = OTHER; note = 2'-O-methylguanosine-3'-phosphate
  modified_base 5: mod_base = OTHER; note = 2'-fluoroadenosine-3'-phosphate
  modified_base 6: mod_base = OTHER; note = 2'-O-methyluridine-3'-phosphate
  modified_base 7: mod_base = OTHER; note = 2'-fluorouridine-3'-phosphate
  modified_base 8: mod_base = OTHER; note = 2'-O-methylcytidine-3'-phosphate
  modified_base 9: mod_base = OTHER; note = 2'-fluorouridine-3'-phosphate
  modified_base 10: mod_base = OTHER; note = 2'-O-methylguanosine-3'-phosphate
  modified_base 11: mod_base = OTHER; note = 2'-fluoroadenosine-3'-phosphate
  modified_base 12: mod_base = OTHER; note = 2'-O-methyladenosine-3'-phosphate
  modified_base 13: mod_base = OTHER; note = 2'-fluoroguanosine-3'-phosphate
  modified_base 14: mod_base = OTHER; note = 2'-O-methylguanosine-3'-phosphate
  modified_base 15: mod_base = OTHER; note = 2'-fluorouridine-3'-phosphate
  modified_base 16: mod_base = OTHER; note = 2'-O-methylguanosine-3'-phosphate
  modified_base 17: mod_base = OTHER; note = 2'-fluoroadenosine-3'-phosphorothioate
  modified_base 18: mod_base = OTHER; note = 2'-O-methyluridine-3'-phosphorothioate
  modified_base 19: mod_base = OTHER; note = 2'-fluorouridine
cgagattctgaaggtgatt

SEQ ID NO: 647 - RNA, 19 nt, synthetic construct
  source 1..19: mol_type = other RNA
  modified_base 1: mod_base = OTHER; note = 2'-fluoroadenosine-3'-phosphorothioate
  modified_base 2: mod_base = OTHER; note = 2'-O-methyluridine-3'-phosphorothioate
  modified_base 3: mod_base = OTHER; note = 2'-fluorouridine-3'-phosphate
  modified_base 4: mod_base = OTHER; note = 2'-O-methylcytidine-3'-phosphate
  modified_base 5: mod_base = OTHER; note = 2'-fluorouridine-3'-phosphate
  modified_base 6: mod_base = OTHER; note = 2'-O-methylguanosine-3'-phosphate
  modified_base 7: mod_base = OTHER; note = 2'-fluoroadenosine-3'-phosphate
  modified_base 8: mod_base = OTHER; note = 2'-O-methyladenosine-3'-phosphate
  modified_base 9: mod_base = OTHER; note = 2'-fluoroguanosine-3'-phosphate
  modified_base 10: mod_base = OTHER; note = 2'-O-methylguanosine-3'-phosphate
  modified_base 11: mod_base = OTHER; note = 2'-fluorouridine-3'-phosphate
  modified_base 12: mod_base = OTHER; note = 2'-O-methylguanosine-3'-phosphate
  modified_base 13: mod_base = OTHER; note = 2'-fluoroadenosine-3'-phosphate
  modified_base 14: mod_base = OTHER; note = 2'-O-methyluridine-3'-phosphate
  modified_base 15: mod_base = OTHER; note = 2'-fluorocytidine-3'-phosphate
  modified_base 16: mod_base = OTHER; note = 2'-O-methylguanosine-3'-phosphate
  modified_base 17: mod_base = OTHER; note = 2'-fluoroguanosine-3'-phosphorothioate
  modified_base 18: mod_base = OTHER; note = 2'-O-methyladenosine-3'-phosphorothioate
  modified_base 19: mod_base = OTHER; note = 2'-fluorouridine
attctgaaggtgatcggat

SEQ ID NO: 648 - RNA, 19 nt, synthetic construct
  source 1..19: mol_type = other RNA
  modified_base 1: mod_base = OTHER; note = 2'-fluoroguanosine-3'-phosphorothioate
  modified_base 2: mod_base = OTHER; note = 2'-O-methyladenosine-3'-phosphorothioate
  modified_base 3: mod_base = OTHER; note = 2'-fluorouridine-3'-phosphate
  modified_base 4: mod_base = OTHER; note = 2'-O-methylguanosine-3'-phosphate
  modified_base 5: mod_base = OTHER; note = 2'-fluoroadenosine-3'-phosphate
  modified_base 6: mod_base = OTHER; note = 2'-O-methyladenosine-3'-phosphate
  modified_base 7: mod_base = OTHER; note = 2'-fluoroguanosine-3'-phosphate
  modified_base 8: mod_base = OTHER; note = 2'-O-methylcytidine-3'-phosphate
  modified_base 9: mod_base = OTHER; note = 2'-fluoroadenosine-3'-phosphate
  modified_base 10: mod_base = OTHER; note = 2'-O-methylguanosine-3'-phosphate
  modified_base 11: mod_base = OTHER; note = 2'-fluoroadenosine-3'-phosphate
  modified_base 12: mod_base = OTHER; note = 2'-O-methylcytidine-3'-phosphate
  modified_base 13: mod_base = OTHER; note = 2'-fluoroguanosine-3'-phosphate
  modified_base 14: mod_base = OTHER; note = 2'-O-methylguanosine-3'-phosphate
  modified_base 15: mod_base = OTHER; note = 2'-fluoroguanosine-3'-phosphate
  modified_base 16: mod_base = OTHER; note = 2'-O-methylcytidine-3'-phosphate
  modified_base 17: mod_base = OTHER; note = 2'-fluorocytidine-3'-phosphorothioate
  modified_base 18: mod_base = OTHER; note = 2'-O-methyladenosine-3'-phosphorothioate
  modified_base 19: mod_base = OTHER; note = 2'-fluorouridine
gatgaagcagacgggccat

SEQ ID NO: 649 - RNA, 19 nt, synthetic construct
  source 1..19: mol_type = other RNA
  modified_base 1: mod_base = OTHER; note = 2'-fluoroadenosine-3'-phosphorothioate
  modified_base 2: mod_base = OTHER; note = 2'-O-methylguanosine-3'-phosphorothioate
  modified_base 3: mod_base = OTHER; note = 2'-fluorocytidine-3'-phosphate
  modified_base 4: mod_base = OTHER; note = 2'-O-methyladenosine-3'-phosphate
  modified_base 5: mod_base = OTHER; note = 2'-fluoroguanosine-3'-phosphate
  modified_base 6: mod_base = OTHER; note = 2'-O-methyladenosine-3'-phosphate
  modified_base 7: mod_base = OTHER; note = 2'-fluorocytidine-3'-phosphate
  modified_base 8: mod_base = OTHER; note = 2'-O-methylguanosine-3'-phosphate
  modified_base 9: mod_base = OTHER; note = 2'-fluoroguanosine-3'-phosphate
  modified_base 10: mod_base = OTHER; note = 2'-O-methylguanosine-3'-phosphate
  modified_base 11: mod_base = OTHER; note = 2'-fluorocytidine-3'-phosphate
  modified_base 12: mod_base = OTHER; note = 2'-O-methylcytidine-3'-phosphate
  modified_base 13: mod_base = OTHER; note = 2'-fluoroadenosine-3'-phosphate
  modified_base 14: mod_base = OTHER; note = 2'-O-methylguanosine-3'-phosphate
  modified_base 15: mod_base = OTHER; note = 2'-fluoroguanosine-3'-phosphate
  modified_base 16: mod_base = OTHER; note = 2'-O-methyluridine-3'-phosphate
  modified_base 17: mod_base = OTHER; note = 2'-fluoroguanosine-3'-phosphorothioate
  modified_base 18: mod_base = OTHER; note = 2'-O-methyluridine-3'-phosphorothioate
  modified_base 19: mod_base = OTHER; note = 2'-fluoroadenosine
agcagacgggccaggtgta

SEQ ID NO: 650 - RNA, 19 nt, synthetic construct
  source 1..19: mol_type = other RNA
  modified_base 1: mod_base = OTHER; note = 2'-fluorocytidine-3'-phosphorothioate
  modified_base 2: mod_base = OTHER; note = 2'-O-methyladenosine-3'-phosphorothioate
  modified_base 3: mod_base = OTHER; note = 2'-fluorouridine-3'-phosphate
  modified_base 4: mod_base = OTHER; note = 2'-O-methylguanosine-3'-phosphate
  modified_base 5: mod_base = OTHER; note = 2'-fluoroadenosine-3'-phosphate
  modified_base 6: mod_base = OTHER; note = 2'-O-methyladenosine-3'-phosphate
  modified_base 7: mod_base = OTHER; note = 2'-fluoroguanosine-3'-phosphate
  modified_base 8: mod_base = OTHER; note = 2'-O-methyladenosine-3'-phosphate
  modified_base 9: mod_base = OTHER; note = 2'-fluorouridine-3'-phosphate
  modified_base 10: mod_base = OTHER; note = 2'-O-methylcytidine-3'-phosphate
  modified_base 11: mod_base = OTHER; note = 2'-fluoroadenosine-3'-phosphate
  modified_base 12: mod_base = OTHER; note = 2'-O-methyluridine-3'-phosphate
  modified_base 13: mod_base = OTHER; note = 2'-fluoroguanosine-3'-phosphate
  modified_base 14: mod_base = OTHER; note = 2'-O-methyladenosine-3'-phosphate
  modified_base 15: mod_base = OTHER; note = 2'-fluoroadenosine-3'-phosphate
  modified_base 16: mod_base = OTHER; note = 2'-O-methylcytidine-3'-phosphate
  modified_base 17: mod_base = OTHER; note = 2'-fluoroadenosine-3'-phosphorothioate
  modified_base 18: mod_base = OTHER; note = 2'-O-methyladenosine-3'-phosphorothioate
  modified_base 19: mod_base = OTHER; note = 2'-fluorouridine
catgaagatcatgaacaat

SEQ ID NO: 651 - RNA, 19 nt, synthetic construct
  source 1..19: mol_type = other RNA
  modified_base 1: mod_base = OTHER; note = 2'-fluorouridine-3'-phosphorothioate
  modified_base 2: mod_base = OTHER; note = 2'-O-methylguanosine-3'-phosphorothioate
  modified_base 3: mod_base = OTHER; note = 2'-fluoroadenosine-3'-phosphate
  modified_base 4: mod_base = OTHER; note = 2'-O-methyladenosine-3'-phosphate
  modified_base 5: mod_base = OTHER; note = 2'-fluoroguanosine-3'-phosphate
  modified_base 6: mod_base = OTHER; note = 2'-O-methyladenosine-3'-phosphate
  modified_base 7: mod_base = OTHER; note = 2'-fluorouridine-3'-phosphate
  modified_base 8: mod_base = OTHER; note = 2'-O-methylcytidine-3'-phosphate
  modified_base 9: mod_base = OTHER; note = 2'-fluoroadenosine-3'-phosphate
  modified_base 10: mod_base = OTHER; note = 2'-O-methyluridine-3'-phosphate
  modified_base 11: mod_base = OTHER; note = 2'-fluoroguanosine-3'-phosphate
  modified_base 12: mod_base = OTHER; note = 2'-O-methyladenosine-3'-phosphate
  modified_base 13: mod_base = OTHER; note = 2'-fluoroadenosine-3'-phosphate
  modified_base 14: mod_base = OTHER; note = 2'-O-methylcytidine-3'-phosphate
  modified_base 15: mod_base = OTHER; note = 2'-fluoroadenosine-3'-phosphate
  modified_base 16: mod_base = OTHER; note = 2'-O-methyladenosine-3'-phosphate
  modified_base 17: mod_base = OTHER; note = 2'-fluoroguanosine-3'-phosphorothioate
  modified_base 18: mod_base = OTHER; note = 2'-O-methyluridine-3'-phosphorothioate
  modified_base 19: mod_base = OTHER; note = 2'-fluorouridine
tgaagatcatgaacaagtt

SEQ ID NO: 652 - RNA, 19 nt, synthetic construct
  source 1..19: mol_type = other RNA
  modified_base 1: mod_base = OTHER; note = 2'-fluorocytidine-3'-phosphorothioate
  modified_base 2: mod_base = OTHER; note = 2'-O-methyladenosine-3'-phosphorothioate
  modified_base 3: mod_base = OTHER; note = 2'-fluorouridine-3'-phosphate
  modified_base 4: mod_base = OTHER; note = 2'-O-methylguanosine-3'-phosphate
  modified_base 5: mod_base = OTHER; note = 2'-fluoroadenosine-3'-phosphate
  modified_base 6: mod_base = OTHER; note = 2'-O-methyladenosine-3'-phosphate
  modified_base 7: mod_base = OTHER; note = 2'-fluorocytidine-3'-phosphate
  modified_base 8: mod_base = OTHER; note = 2'-O-methyladenosine-3'-phosphate
  modified_base 9: mod_base = OTHER; note = 2'-fluoroadenosine-3'-phosphate
  modified_base 10: mod_base = OTHER; note = 2'-O-methylguanosine-3'-phosphate
  modified_base 11: mod_base = OTHER; note = 2'-fluorouridine-3'-phosphate
  modified_base 12: mod_base = OTHER; note = 2'-O-methylguanosine-3'-phosphate
  modified_base 13: mod_base = OTHER; note = 2'-fluoroguanosine-3'-phosphate
  modified_base 14: mod_base = OTHER; note = 2'-O-methylguanosine-3'-phosphate
  modified_base 15: mod_base = OTHER; note = 2'-fluoroadenosine-3'-phosphate
  modified_base 16: mod_base = OTHER; note = 2'-O-methylcytidine-3'-phosphate
  modified_base 17: mod_base = OTHER; note = 2'-fluoroadenosine-3'-phosphorothioate
  modified_base 18: mod_base = OTHER; note = 2'-O-methyluridine-3'-phosphorothioate
  modified_base 19: mod_base = OTHER; note = 2'-fluorouridine
catgaacaagtgggacatt

SEQ ID NO: 653 - RNA, 19 nt, synthetic construct
  source 1..19: mol_type = other RNA
  modified_base 1: mod_base = OTHER; note = 2'-fluorocytidine-3'-phosphorothioate
  modified_base 2: mod_base = OTHER; note = 2'-O-methyladenosine-3'-phosphorothioate
  modified_base 3: mod_base = OTHER; note = 2'-fluoroadenosine-3'-phosphate
  modified_base 4: mod_base = OTHER; note = 2'-O-methylguanosine-3'-phosphate
  modified_base 5: mod_base = OTHER; note = 2'-fluorouridine-3'-phosphate
  modified_base 6: mod_base = OTHER; note = 2'-O-methylguanosine-3'-phosphate
  modified_base 7: mod_base = OTHER; note = 2'-fluoroguanosine-3'-phosphate
  modified_base 8: mod_base = OTHER; note = 2'-O-methylguanosine-3'-phosphate
  modified_base 9: mod_base = OTHER; note = 2'-fluoroadenosine-3'-phosphate
  modified_base 10: mod_base = OTHER; note = 2'-O-methylcytidine-3'-phosphate
  modified_base 11: mod_base = OTHER; note = 2'-fluoroadenosine-3'-phosphate
  modified_base 12: mod_base = OTHER; note = 2'-O-methyluridine-3'-phosphate
  modified_base 13: mod_base = OTHER; note = 2'-fluoroguanosine-3'-phosphate
  modified_base 14: mod_base = OTHER; note = 2'-O-methylcytidine-3'-phosphate
  modified_base 15: mod_base = OTHER; note = 2'-fluorouridine-3'-phosphate
  modified_base 16: mod_base = OTHER; note = 2'-O-methylguanosine-3'-phosphate
  modified_base 17: mod_base = OTHER; note = 2'-fluoroadenosine-3'-phosphorothioate
  modified_base 18: mod_base = OTHER; note = 2'-O-methyladenosine-3'-phosphorothioate
  modified_base 19: mod_base = OTHER; note = 2'-fluorouridine
caagtgggacatgctgaat

SEQ ID NO: 654 - RNA, 19 nt, synthetic construct
  source 1..19: mol_type = other RNA
  modified_base 1: mod_base = OTHER; note = 2'-fluoroguanosine-3'-phosphorothioate
  modified_base 2: mod_base = OTHER; note = 2'-O-methyladenosine-3'-phosphorothioate
  modified_base 3: mod_base = OTHER; note = 2'-fluoroguanosine-3'-phosphate
  modified_base 4: mod_base = OTHER; note = 2'-O-methylguanosine-3'-phosphate
  modified_base 5: mod_base = OTHER; note = 2'-fluorouridine-3'-phosphate
  modified_base 6: mod_base = OTHER; note = 2'-O-methylguanosine-3'-phosphate
  modified_base 7: mod_base = OTHER; note = 2'-fluorouridine-3'-phosphate
  modified_base 8: mod_base = OTHER; note = 2'-O-methylcytidine-3'-phosphate
  modified_base 9: mod_base = OTHER; note = 2'-fluoroguanosine-3'-phosphate
  modified_base 10: mod_base = OTHER; note = 2'-O-methyluridine-3'-phosphate
  modified_base 11: mod_base = OTHER; note = 2'-fluoroguanosine-3'-phosphate
  modified_base 12: mod_base = OTHER; note = 2'-O-methylcytidine-3'-phosphate
  modified_base 13: mod_base = OTHER; note = 2'-fluorouridine-3'-phosphate
  modified_base 14: mod_base = OTHER; note = 2'-O-methyluridine-3'-phosphate
  modified_base 15: mod_base = OTHER; note = 2'-fluorocytidine-3'-phosphate
  modified_base 16: mod_base = OTHER; note = 2'-O-methylcytidine-3'-phosphate
  modified_base 17: mod_base = OTHER; note = 2'-fluoroguanosine-3'-phosphorothioate
  modified_base 18: mod_base = OTHER; note = 2'-O-methyluridine-3'-phosphorothioate
  modified_base 19: mod_base = OTHER; note = 2'-fluorouridine
gaggtgtcgtgcttccgtt

SEQ ID NO: 655 - RNA, 19 nt, synthetic construct
  source 1..19: mol_type = other RNA
  modified_base 1: mod_base = OTHER; note = 2'-fluoroguanosine-3'-phosphorothioate
  modified_base 2: mod_base = OTHER; note = 2'-O-methylguanosine-3'-phosphorothioate
  modified_base 3: mod_base = OTHER; note = 2'-fluorouridine-3'-phosphate
  modified_base 4: mod_base = OTHER; note = 2'-O-methylguanosine-3'-phosphate
  modified_base 5: mod_base = OTHER; note = 2'-fluorouridine-3'-phosphate
  modified_base 6: mod_base = OTHER; note = 2'-O-methylcytidine-3'-phosphate
  modified_base 7: mod_base = OTHER; note = 2'-fluoroguanosine-3'-phosphate
  modified_base 8: mod_base = OTHER; note = 2'-O-methyluridine-3'-phosphate
  modified_base 9: mod_base = OTHER; note = 2'-fluoroguanosine-3'-phosphate
  modified_base 10: mod_base = OTHER; note = 2'-O-methylcytidine-3'-phosphate
  modified_base 11: mod_base = OTHER; note = 2'-fluorouridine-3'-phosphate
  modified_base 12: mod_base = OTHER; note = 2'-O-methyluridine-3'-phosphate
  modified_base 13: mod_base = OTHER; note = 2'-fluorocytidine-3'-phosphate
  modified_base 14: mod_base = OTHER; note = 2'-O-methylcytidine-3'-phosphate
  modified_base 15: mod_base = OTHER; note = 2'-fluoroguanosine-3'-phosphate
  modified_base 16: mod_base = OTHER; note = 2'-O-methyluridine-3'-phosphate
  modified_base 17: mod_base = OTHER; note = 2'-fluoroguanosine-3'-phosphorothioate
  modified_base 18: mod_base = OTHER; note = 2'-O-methyladenosine-3'-phosphorothioate
  modified_base 19: mod_base = OTHER; note = 2'-fluorouridine
ggtgtcgtgcttccgtgat

SEQ ID NO: 656 - RNA, 19 nt, synthetic construct
  source 1..19: mol_type = other RNA
  modified_base 1: mod_base = OTHER; note = 2'-fluorocytidine-3'-phosphorothioate
  modified_base 2: mod_base = OTHER; note = 2'-O-methylguanosine-3'-phosphorothioate
  modified_base 3: mod_base = OTHER; note = 2'-fluorouridine-3'-phosphate
  modified_base 4: mod_base = OTHER; note = 2'-O-methylguanosine-3'-phosphate
  modified_base 5: mod_base = OTHER; note = 2'-fluorocytidine-3'-phosphate
  modified_base 6: mod_base = OTHER; note = 2'-O-methyluridine-3'-phosphate
  modified_base 7: mod_base = OTHER; note = 2'-fluorouridine-3'-phosphate
  modified_base 8: mod_base = OTHER; note = 2'-O-methylcytidine-3'-phosphate
  modified_base 9: mod_base = OTHER; note = 2'-fluorocytidine-3'-phosphate
  modified_base 10: mod_base = OTHER; note = 2'-O-methylguanosine-3'-phosphate
  modified_base 11: mod_base = OTHER; note = 2'-fluorouridine-3'-phosphate
  modified_base 12: mod_base = OTHER; note = 2'-O-methylguanosine-3'-phosphate
  modified_base 13: mod_base = OTHER; note = 2'-fluoroadenosine-3'-phosphate
  modified_base 14: mod_base = OTHER; note = 2'-O-methylguanosine-3'-phosphate
  modified_base 15: mod_base = OTHER; note = 2'-fluoroguanosine-3'-phosphate
  modified_base 16: mod_base = OTHER; note = 2'-O-methyladenosine-3'-phosphate
  modified_base 17: mod_base = OTHER; note = 2'-fluoroguanosine-3'-phosphorothioate
  modified_base 18: mod_base = OTHER; note = 2'-O-methyladenosine-3'-phosphorothioate
  modified_base 19: mod_base = OTHER; note = 2'-fluorouridine
cgtgcttccgtgaggagat

SEQ ID NO: 657 - RNA, 19 nt, synthetic construct
  source 1..19: mol_type = other RNA
  modified_base 1: mod_base = OTHER; note = 2'-fluorocytidine-3'-phosphorothioate
  modified_base 2: mod_base = OTHER; note = 2'-O-methylcytidine-3'-phosphorothioate
  modified_base 3: mod_base = OTHER; note = 2'-fluoroguanosine-3'-phosphate
  modified_base 4: mod_base = OTHER; note = 2'-O-methyluridine-3'-phosphate
  modified_base 5: mod_base = OTHER; note = 2'-fluoroguanosine-3'-phosphate
  modified_base 6: mod_base = OTHER; note = 2'-O-methyladenosine-3'-phosphate
  modified_base 7: mod_base = OTHER; note = 2'-fluoroguanosine-3'-phosphate
  modified_base 8: mod_base = OTHER; note = 2'-O-methylguanosine-3'-phosphate
  modified_base 9: mod_base = OTHER; note = 2'-fluoroadenosine-3'-phosphate
  modified_base 10: mod_base = OTHER; note = 2'-O-methylguanosine-3'-phosphate
  modified_base 11: mod_base = OTHER; note = 2'-fluoroadenosine-3'-phosphate
  modified_base 12: mod_base = OTHER; note = 2'-O-methylguanosine-3'-phosphate
  modified_base 13: mod_base = OTHER; note = 2'-fluoroguanosine-3'-phosphate
  modified_base 14: mod_base = OTHER; note = 2'-O-methylguanosine-3'-phosphate
  modified_base 15: mod_base = OTHER; note = 2'-fluoroadenosine-3'-phosphate
  modified_base 16: mod_base = OTHER; note = 2'-O-methylcytidine-3'-phosphate
  modified_base 17: mod_base = OTHER; note = 2'-fluoroguanosine-3'-phosphorothioate
  modified_base 18: mod_base = OTHER; note = 2'-O-methyluridine-3'-phosphorothioate
  modified_base 19: mod_base = OTHER; note = 2'-fluorouridine
ccgtgaggagagggacgtt

SEQ ID NO: 658 - RNA, 19 nt, synthetic construct
  source 1..19: mol_type = other RNA
  modified_base 1: mod_base = OTHER; note = 2'-fluoroguanosine-3'-phosphorothioate
  modified_base 2: mod_base = OTHER; note = 2'-O-methyluridine-3'-phosphorothioate
  modified_base 3: mod_base = OTHER; note = 2'-fluoroguanosine-3'-phosphate
  modified_base 4: mod_base = OTHER; note = 2'-O-methyladenosine-3'-phosphate
  modified_base 5: mod_base = OTHER; note = 2'-fluoroguanosine-3'-phosphate
  modified_base 6: mod_base = OTHER; note = 2'-O-methylguanosine-3'-phosphate
  modified_base 7: mod_base = OTHER; note = 2'-fluoroadenosine-3'-phosphate
  modified_base 8: mod_base = OTHER; note = 2'-O-methylguanosine-3'-phosphate
  modified_base 9: mod_base = OTHER; note = 2'-fluoroadenosine-3'-phosphate
  modified_base 10: mod_base = OTHER; note = 2'-O-methylguanosine-3'-phosphate
  modified_base 11: mod_base = OTHER; note = 2'-fluoroguanosine-3'-phosphate
  modified_base 12: mod_base = OTHER; note = 2'-O-methylguanosine-3'-phosphate
  modified_base 13: mod_base = OTHER; note = 2'-fluoroadenosine-3'-phosphate
  modified_base 14: mod_base = OTHER; note = 2'-O-methylcytidine-3'-phosphate
  modified_base 15: mod_base = OTHER; note = 2'-fluoroguanosine-3'-phosphate
  modified_base 16: mod_base = OTHER; note = 2'-O-methyluridine-3'-phosphate
  modified_base 17: mod_base = OTHER; note = 2'-fluoroguanosine-3'-phosphorothioate
  modified_base 18: mod_base = OTHER; note = 2'-O-methyluridine-3'-phosphorothioate
  modified_base 19: mod_base = OTHER; note = 2'-fluorouridine
gtgaggagagggacgtgtt

SEQ ID NO: 659 - RNA, 19 nt, synthetic construct
  source 1..19: mol_type = other RNA
  modified_base 1: mod_base = OTHER; note = 2'-fluoroadenosine-3'-phosphorothioate
  modified_base 2: mod_base = OTHER; note = 2'-O-methylguanosine-3'-phosphorothioate
  modified_base 3: mod_base = OTHER; note = 2'-fluoroadenosine-3'-phosphate
  modified_base 4: mod_base = OTHER; note = 2'-O-methylguanosine-3'-phosphate
  modified_base 5: mod_base = OTHER; note = 2'-fluoroguanosine-3'-phosphate
  modified_base 6: mod_base = OTHER; note = 2'-O-methylguanosine-3'-phosphate
  modified_base 7: mod_base = OTHER; note = 2'-fluoroadenosine-3'-phosphate
  modified_base 8: mod_base = OTHER; note = 2'-O-methylcytidine-3'-phosphate
  modified_base 9: mod_base = OTHER; note = 2'-fluoroguanosine-3'-phosphate
  modified_base 10: mod_base = OTHER; note = 2'-O-methyluridine-3'-phosphate
  modified_base 11: mod_base = OTHER; note = 2'-fluoroguanosine-3'-phosphate
  modified_base 12: mod_base = OTHER; note = 2'-O-methyluridine-3'-phosphate
  modified_base 13: mod_base = OTHER; note = 2'-fluorouridine-3'-phosphate
  modified_base 14: mod_base = OTHER; note = 2'-O-methylguanosine-3'-phosphate
  modified_base 15: mod_base = OTHER; note = 2'-fluoroguanosine-3'-phosphate
  modified_base 16: mod_base = OTHER; note = 2'-O-methyluridine-3'-phosphate
  modified_base 17: mod_base = OTHER; note = 2'-fluoroguanosine-3'-phosphorothioate
  modified_base 18: mod_base = OTHER; note = 2'-O-methyladenosine-3'-phosphorothioate
  modified_base 19: mod_base = OTHER; note = 2'-fluoroadenosine
agagggacgtgttggtgaa

SEQ ID NO: 660 - RNA, 19 nt, synthetic construct
  source 1..19: mol_type = other RNA
  modified_base 1: mod_base = OTHER; note = 2'-fluoroguanosine-3'-phosphorothioate
  modified_base 2: mod_base = OTHER; note = 2'-O-methyladenosine-3'-phosphorothioate
  modified_base 3: mod_base = OTHER; note = 2'-fluoroguanosine-3'-phosphate
  modified_base 4: mod_base = OTHER; note = 2'-O-methylguanosine-3'-phosphate
  modified_base 5: mod_base = OTHER; note = 2'-fluoroguanosine-3'-phosphate
  modified_base 6: mod_base = OTHER; note = 2'-O-methyladenosine-3'-phosphate
  modified_base 7: mod_base = OTHER; note = 2'-fluorocytidine-3'-phosphate
  modified_base 8: mod_base = OTHER; note = 2'-O-methylguanosine-3'-phosphate
  modified_base 9: mod_base = OTHER; note = 2'-fluorouridine-3'-phosphate
  modified_base 10: mod_base = OTHER; note = 2'-O-methylguanosine-3'-phosphate
  modified_base 11: mod_base = OTHER; note = 2'-fluorouridine-3'-phosphate
  modified_base 12: mod_base = OTHER; note = 2'-O-methyluridine-3'-phosphate
  modified_base 13: mod_base = OTHER; note = 2'-fluoroguanosine-3'-phosphate
  modified_base 14: mod_base = OTHER; note = 2'-O-methylguanosine-3'-phosphate
  modified_base 15: mod_base = OTHER; note = 2'-fluorouridine-3'-phosphate
  modified_base 16: mod_base = OTHER; note = 2'-O-methylguanosine-3'-phosphate
  modified_base 17: mod_base = OTHER; note = 2'-fluoroadenosine-3'-phosphorothioate
  modified_base 18: mod_base = OTHER; note = 2'-O-methyladenosine-3'-phosphorothioate
  modified_base 19: mod_base = OTHER; note = 2'-fluorouridine
gagggacgtgttggtgaat

SEQ ID NO: 661 - RNA, 19 nt, synthetic construct
  source 1..19: mol_type = other RNA
  modified_base 1: mod_base = OTHER; note = 2'-fluoroadenosine-3'-phosphorothioate
  modified_base 2: mod_base = OTHER; note = 2'-O-methylguanosine-3'-phosphorothioate
  modified_base 3: mod_base = OTHER; note = 2'-fluoroguanosine-3'-phosphate
  modified_base 4: mod_base = OTHER; note = 2'-O-methylguanosine-3'-phosphate
  modified_base 5: mod_base = OTHER; note = 2'-fluoroadenosine-3'-phosphate
  modified_base 6: mod_base = OTHER; note = 2'-O-methylcytidine-3'-phosphate
  modified_base 7: mod_base = OTHER; note = 2'-fluoroguanosine-3'-phosphate
  modified_base 8: mod_base = OTHER; note = 2'-O-methyluridine-3'-phosphate
  modified_base 9: mod_base = OTHER; note = 2'-fluoroguanosine-3'-phosphate
  modified_base 10: mod_base = OTHER; note = 2'-O-methyluridine-3'-phosphate
  modified_base 11: mod_base = OTHER; note = 2'-fluorouridine-3'-phosphate
  modified_base 12: mod_base = OTHER; note = 2'-O-methylguanosine-3'-phosphate
  modified_base 13: mod_base = OTHER; note = 2'-fluoroguanosine-3'-phosphate
  modified_base 14: mod_base = OTHER; note = 2'-O-methyluridine-3'-phosphate
  modified_base 15: mod_base = OTHER; note = 2'-fluoroguanosine-3'-phosphate
  modified_base 16: mod_base = OTHER; note = 2'-O-methyladenosine-3'-phosphate
  modified_base 17: mod_base = OTHER; note = 2'-fluoroadenosine-3'-phosphorothioate
  modified_base 18: mod_base = OTHER; note = 2'-O-methyluridine-3'-phosphorothioate
  modified_base 19: mod_base = OTHER; note = 2'-fluoroguanosine
agggacgtgttggtgaatg

SEQ ID NO: 662 - RNA, 19 nt, synthetic construct
  source 1..19: mol_type = other RNA
  modified_base 1: mod_base = OTHER; note = 2'-fluoroguanosine-3'-phosphorothioate
  modified_base 2: mod_base = OTHER; note = 2'-O-methylguanosine-3'-phosphorothioate
  modified_base 3: mod_base = OTHER; note = 2'-fluorouridine-3'-phosphate
  modified_base 4: mod_base = OTHER; note = 2'-O-methylguanosine-3'-phosphate
  modified_base 5: mod_base = OTHER; note = 2'-fluoroguanosine-3'-phosphate
  modified_base 6: mod_base = OTHER; note = 2'-O-methyladenosine-3'-phosphate
  modified_base 7: mod_base = OTHER; note = 2'-fluorouridine-3'-phosphate
  modified_base 8: mod_base = OTHER; note = 2'-O-methylcytidine-3'-phosphate
  modified_base 9: mod_base = OTHER; note = 2'-fluoroadenosine-3'-phosphate
  modified_base 10: mod_base = OTHER; note = 2'-O-methylcytidine-3'-phosphate
  modified_base 11: mod_base = OTHER; note = 2'-fluoroguanosine-3'-phosphate
  modified_base 12: mod_base = OTHER; note = 2'-O-methylcytidine-3'-phosphate
  modified_base 13: mod_base = OTHER; note = 2'-fluoroadenosine-3'-phosphate
  modified_base 14: mod_base = OTHER; note = 2'-O-methylguanosine-3'-phosphate
  modified_base 15: mod_base = OTHER; note = 2'-fluorocytidine-3'-phosphate
  modified_base 16: mod_base = OTHER; note = 2'-O-methyluridine-3'-phosphate
  modified_base 17: mod_base = OTHER; note = 2'-fluoroguanosine-3'-phosphorothioate
  modified_base 18: mod_base = OTHER; note = 2'-O-methylcytidine-3'-phosphorothioate
  modified_base 19: mod_base = OTHER; note = 2'-fluoroadenosine
ggtggatcacgcagctgca

SEQ ID NO: 663 - RNA, 19 nt, synthetic construct
  source 1..19: mol_type = other RNA
  modified_base 1: mod_base = OTHER; note = 2'-fluorouridine-3'-phosphorothioate
  modified_base 2: mod_base = OTHER; note = 2'-O-methylcytidine-3'-phosphorothioate
  modified_base 3: mod_base = OTHER; note = 2'-fluoroguanosine-3'-phosphate
  modified_base 4: mod_base = OTHER; note = 2'-O-methylcytidine-3'-phosphate
  modified_base 5: mod_base = OTHER; note = 2'-fluorocytidine-3'-phosphate
  modified_base 6: mod_base = OTHER; note = 2'-O-methyluridine-3'-phosphate
  modified_base 7: mod_base = OTHER; note = 2'-fluorouridine-3'-phosphate
  modified_base 8: mod_base = OTHER; note = 2'-O-methylcytidine-3'-phosphate
  modified_base 9: mod_base = OTHER; note = 2'-fluorocytidine-3'-phosphate
  modified_base 10: mod_base = OTHER; note = 2'-O-methyladenosine-3'-phosphate
  modified_base 11: mod_base = OTHER; note = 2'-fluoroguanosine-3'-phosphate
  modified_base 12: mod_base = OTHER; note = 2'-O-methylguanosine-3'-phosphate
  modified_base 13: mod_base = OTHER; note = 2'-fluoroadenosine-3'-phosphate
  modified_base 14: mod_base = OTHER; note = 2'-O-methyluridine-3'-phosphate
  modified_base 15: mod_base = OTHER; note = 2'-fluoroguanosine-3'-phosphate
  modified_base 16: mod_base = OTHER; note = 2'-O-methyladenosine-3'-phosphate
  modified_base 17: mod_base = OTHER; note = 2'-fluoroguanosine-3'-phosphorothioate
  modified_base 18: mod_base = OTHER; note = 2'-O-methyladenosine-3'-phosphorothioate
  modified_base 19: mod_base = OTHER; note = 2'-fluoroadenosine
tcgccttccaggatgagaa

SEQ ID NO: 664 - RNA, 19 nt, synthetic construct
  source 1..19: mol_type = other RNA
  modified_base 1: mod_base = OTHER; note = 2'-fluorocytidine-3'-phosphorothioate
  modified_base 2: mod_base = OTHER; note = 2'-O-methylguanosine-3'-phosphorothioate
  modified_base 3: mod_base = OTHER; note = 2'-fluorocytidine-3'-phosphate
  modified_base 4: mod_base = OTHER; note = 2'-O-methylcytidine-3'-phosphate
  modified_base 5: mod_base = OTHER; note = 2'-fluorouridine-3'-phosphate
  modified_base 6: mod_base = OTHER; note = 2'-O-methyluridine-3'-phosphate
  modified_base 7: mod_base = OTHER; note = 2'-fluorocytidine-3'-phosphate
  modified_base 8: mod_base = OTHER; note = 2'-O-methylcytidine-3'-phosphate
  modified_base 9: mod_base = OTHER; note = 2'-fluoroadenosine-3'-phosphate
  modified_base 10: mod_base = OTHER; note = 2'-O-methylguanosine-3'-phosphate
  modified_base 11: mod_base = OTHER; note = 2'-fluoroguanosine-3'-phosphate
  modified_base 12: mod_base = OTHER; note = 2'-O-methyladenosine-3'-phosphate
  modified_base 13: mod_base = OTHER; note = 2'-fluorouridine-3'-phosphate
  modified_base 14: mod_base = OTHER; note = 2'-O-methylguanosine-3'-phosphate
  modified_base 15: mod_base = OTHER; note = 2'-fluoroadenosine-3'-phosphate
  modified_base 16: mod_base = OTHER; note = 2'-O-methylguanosine-3'-phosphate
  modified_base 17: mod_base = OTHER; note = 2'-fluoroadenosine-3'-phosphorothioate
  modified_base 18: mod_base = OTHER; note = 2'-O-methyladenosine-3'-phosphorothioate
  modified_base 19: mod_base = OTHER; note = 2'-fluorouridine
cgccttccaggatgagaat

SEQ ID NO: 665 - RNA, 19 nt, synthetic construct
  source 1..19: mol_type = other RNA
  modified_base 1: mod_base = OTHER; note = 2'-fluorocytidine-3'-phosphorothioate
  modified_base 2: mod_base = OTHER; note = 2'-O-methylcytidine-3'-phosphorothioate
  modified_base 3: mod_base = OTHER; note = 2'-fluorouridine-3'-phosphate
  modified_base 4: mod_base = OTHER; note = 2'-O-methylguanosine-3'-phosphate
  modified_base 5: mod_base = OTHER; note = 2'-fluorouridine-3'-phosphate
  modified_base 6: mod_base = OTHER; note = 2'-O-methyladenosine-3'-phosphate
  modified_base 7: mod_base = OTHER; note = 2'-fluorocytidine-3'-phosphate
  modified_base 8: mod_base = OTHER; note = 2'-O-methylcytidine-3'-phosphate
  modified_base 9: mod_base = OTHER; note = 2'-fluorouridine-3'-phosphate
  modified_base 10: mod_base = OTHER; note = 2'-O-methylguanosine-3'-phosphate
  modified_base 11: mod_base = OTHER; note = 2'-fluoroguanosine-3'-phosphate
  modified_base 12: mod_base = OTHER; note = 2'-O-methyluridine-3'-phosphate
  modified_base 13: mod_base = OTHER; note = 2'-fluorocytidine-3'-phosphate
  modified_base 14: mod_base = OTHER; note = 2'-O-methyladenosine-3'-phosphate
  modified_base 15: mod_base = OTHER; note = 2'-fluorouridine-3'-phosphate
  modified_base 16: mod_base = OTHER; note = 2'-O-methylguanosine-3'-phosphate
  modified_base 17: mod_base = OTHER; note = 2'-fluoroguanosine-3'-phosphorothioate
  modified_base 18: mod_base = OTHER; note = 2'-O-methyladenosine-3'-phosphorothioate
  modified_base 19: mod_base = OTHER; note = 2'-fluorouridine
cctgtacctggtcatggat

SEQ ID NO: 666 - RNA, 19 nt, synthetic construct
  source 1..19: mol_type = other RNA
  modified_base 1: mod_base = OTHER; note = 2'-fluorocytidine-3'-phosphorothioate
  modified_base 2: mod_base = OTHER; note = 2'-O-methyluridine-3'-phosphorothioate
  modified_base 3: mod_base = OTHER; note = 2'-fluoroguanosine-3'-phosphate
  modified_base 4: mod_base = OTHER; note = 2'-O-methyluridine-3'-phosphate
  modified_base 5: mod_base = OTHER; note = 2'-fluoroadenosine-3'-phosphate
  modified_base 6: mod_base = OTHER; note = 2'-O-methylcytidine-3'-phosphate
  modified_base 7: mod_base = OTHER; note = 2'-fluorocytidine-3'-phosphate
  modified_base 8: mod_base = OTHER; note = 2'-O-methyluridine-3'-phosphate
  modified_base 9: mod_base = OTHER; note = 2'-fluoroguanosine-3'-phosphate
  modified_base 10: mod_base = OTHER; note = 2'-O-methylguanosine-3'-phosphate
  modified_base 11: mod_base = OTHER; note = 2'-fluorouridine-3'-phosphate
  modified_base 12: mod_base = OTHER; note = 2'-O-methylcytidine-3'-phosphate
  modified_base 13: mod_base = OTHER; note = 2'-fluoroadenosine-3'-phosphate
  modified_base 14: mod_base = OTHER; note = 2'-O-methyluridine-3'-phosphate
  modified_base 15: mod_base = OTHER; note = 2'-fluoroguanosine-3'-phosphate
  modified_base 16: mod_base = OTHER; note = 2'-O-methylguanosine-3'-phosphate
  modified_base 17: mod_base = OTHER; note = 2'-fluoroadenosine-3'-phosphorothioate
  modified_base 18: mod_base = OTHER; note = 2'-O-methylguanosine-3'-phosphorothioate
  modified_base 19: mod_base = OTHER; note = 2'-fluorouridine
ctgtacctggtcatggagt

SEQ ID NO: 667 - RNA, 19 nt, synthetic construct
  source 1..19: mol_type = other RNA
  modified_base 1: mod_base = OTHER; note = 2'-fluorouridine-3'-phosphorothioate
  modified_base 2: mod_base = OTHER; note = 2'-O-methylguanosine-3'-phosphorothioate
  modified_base 3: mod_base = OTHER; note = 2'-fluorouridine-3'-phosphate
  modified_base 4: mod_base = OTHER; note = 2'-O-methyladenosine-3'-phosphate
  modified_base 5: mod_base = OTHER; note = 2'-fluorocytidine-3'-phosphate
  modified_base 6: mod_base = OTHER; note = 2'-O-methylcytidine-3'-phosphate
  modified_base 7: mod_base = OTHER; note = 2'-fluorouridine-3'-phosphate
  modified_base 8: mod_base = OTHER; note = 2'-O-methylguanosine-3'-phosphate
  modified_base 9: mod_base = OTHER; note = 2'-fluoroguanosine-3'-phosphate
  modified_base 10: mod_base = OTHER; note = 2'-O-methyluridine-3'-phosphate
  modified_base 11: mod_base = OTHER; note = 2'-fluorocytidine-3'-phosphate
  modified_base 12: mod_base = OTHER; note = 2'-O-methyladenosine-3'-phosphate
  modified_base 13: mod_base = OTHER; note = 2'-fluorouridine-3'-phosphate
  modified_base 14: mod_base = OTHER; note = 2'-O-methylguanosine-3'-phosphate
  modified_base 15: mod_base = OTHER; note = 2'-fluoroguanosine-3'-phosphate
  modified_base 16: mod_base = OTHER; note = 2'-O-methyladenosine-3'-phosphate
  modified_base 17: mod_base = OTHER; note = 2'-fluoroguanosine-3'-phosphorothioate
  modified_base 18: mod_base = OTHER; note = 2'-O-methyluridine-3'-phosphorothioate
  modified_base 19: mod_base = OTHER; note = 2'-fluoroadenosine
tgtacctggtcatggagta

SEQ ID NO: 668 - RNA, 19 nt, synthetic construct
  source 1..19: mol_type = other RNA
  modified_base 1: mod_base = OTHER; note = 2'-fluoroguanosine-3'-phosphorothioate
  modified_base 2: mod_base = OTHER; note = 2'-O-methyluridine-3'-phosphorothioate
  modified_base 3: mod_base = OTHER; note = 2'-fluoroadenosine-3'-phosphate
  modified_base 4: mod_base = OTHER; note = 2'-O-methylcytidine-3'-phosphate
  modified_base 5: mod_base = OTHER; note = 2'-fluorocytidine-3'-phosphate
  modified_base 6: mod_base = OTHER; note = 2'-O-methyluridine-3'-phosphate
  modified_base 7: mod_base = OTHER; note = 2'-fluoroguanosine-3'-phosphate
  modified_base 8: mod_base = OTHER; note = 2'-O-methylguanosine-3'-phosphate
  modified_base 9: mod_base = OTHER; note = 2'-fluorouridine-3'-phosphate
  modified_base 10: mod_base = OTHER; note = 2'-O-methylcytidine-3'-phosphate
  modified_base 11: mod_base = OTHER; note = 2'-fluoroadenosine-3'-phosphate
  modified_base 12: mod_base = OTHER; note = 2'-O-methyluridine-3'-phosphate
  modified_base 13: mod_base = OTHER; note = 2'-fluoroguanosine-3'-phosphate
  modified_base 14: mod_base = OTHER; note = 2'-O-methylguanosine-3'-phosphate
  modified_base 15: mod_base = OTHER; note = 2'-fluoroadenosine-3'-phosphate
  modified_base 16: mod_base = OTHER; note = 2'-O-methylguanosine-3'-phosphate
  modified_base 17: mod_base = OTHER; note = 2'-fluorouridine-3'-phosphorothioate
  modified_base 18: mod_base = OTHER; note = 2'-O-methyladenosine-3'-phosphorothioate
  modified_base 19: mod_base = OTHER; note = 2'-fluorouridine
gtacctggtcatggagtat

SEQ ID NO: 669 - RNA, 19 nt, synthetic construct
  source 1..19: mol_type = other RNA
  modified_base 1: mod_base = OTHER; note = 2'-fluorocytidine-3'-phosphorothioate
  modified_base 2: mod_base = OTHER; note = 2'-O-methylcytidine-3'-phosphorothioate
  modified_base 3: mod_base = OTHER; note = 2'-fluorouridine-3'-phosphate
  modified_base 4: mod_base = OTHER; note = 2'-O-methylguanosine-3'-phosphate
  modified_base 5: mod_base = OTHER; note = 2'-fluoroguanosine-3'-phosphate
  modified_base 6: mod_base = OTHER; note = 2'-O-methyluridine-3'-phosphate
  modified_base 7: mod_base = OTHER; note = 2'-fluorocytidine-3'-phosphate
  modified_base 8: mod_base = OTHER; note = 2'-O-methyladenosine-3'-phosphate
  modified_base 9: mod_base = OTHER; note = 2'-fluorouridine-3'-phosphate
  modified_base 10: mod_base = OTHER; note = 2'-O-methylguanosine-3'-phosphate
  modified_base 11: mod_base = OTHER; note = 2'-fluoroguanosine-3'-phosphate
  modified_base 12: mod_base = OTHER; note = 2'-O-methyladenosine-3'-phosphate
  modified_base 13: mod_base = OTHER; note = 2'-fluoroguanosine-3'-phosphate
  modified_base 14: mod_base = OTHER; note = 2'-O-methyluridine-3'-phosphate
  modified_base 15: mod_base = OTHER; note = 2'-fluoroadenosine-3'-phosphate
  modified_base 16: mod_base = OTHER; note = 2'-O-methyluridine-3'-phosphate
  modified_base 17: mod_base = OTHER; note = 2'-fluorouridine-3'-phosphorothioate
  modified_base 18: mod_base = OTHER; note = 2'-O-methyladenosine-3'-phosphorothioate
  modified_base 19: mod_base = OTHER; note = 2'-fluorouridine
cctggtcatggagtattat

SEQ ID NO: 670 - RNA, 19 nt, synthetic construct
  source 1..19: mol_type = other RNA
  modified_base 1: mod_base = OTHER; note = 2'-fluoroguanosine-3'-phosphorothioate
  modified_base 2: mod_base = OTHER; note = 2'-O-methylguanosine-3'-phosphorothioate
  modified_base 3: mod_base = OTHER; note = 2'-fluorouridine-3'-phosphate
  modified_base 4: mod_base = OTHER; note = 2'-O-methylcytidine-3'-phosphate
  modified_base 5: mod_base = OTHER; note = 2'-fluoroadenosine-3'-phosphate
  modified_base 6: mod_base = OTHER; note = 2'-O-methyluridine-3'-phosphate
  modified_base 7: mod_base = OTHER; note = 2'-fluoroguanosine-3'-phosphate
  modified_base 8: mod_base = OTHER; note = 2'-O-methylguanosine-3'-phosphate
  modified_base 9: mod_base = OTHER; note = 2'-fluoroadenosine-3'-phosphate
  modified_base 10: mod_base = OTHER; note = 2'-O-methylguanosine-3'-phosphate
  modified_base 11: mod_base = OTHER; note = 2'-fluorouridine-3'-phosphate
  modified_base 12: mod_base = OTHER; note = 2'-O-methyladenosine-3'-phosphate
  modified_base 13: mod_base = OTHER; note = 2'-fluorouridine-3'-phosphate
  modified_base 14: mod_base = OTHER; note = 2'-O-methyluridine-3'-phosphate
  modified_base 15: mod_base = OTHER; note = 2'-fluoroadenosine-3'-phosphate
  modified_base 16: mod_base = OTHER; note = 2'-O-methylcytidine-3'-phosphate
  modified_base 17: mod_base = OTHER; note = 2'-fluoroguanosine-3'-phosphorothioate
  modified_base 18: mod_base = OTHER; note = 2'-O-methyluridine-3'-phosphorothioate
  modified_base 19: mod_base = OTHER; note = 2'-fluorouridine
ggtcatggagtattacgtt

SEQ ID NO: 671 - RNA, 19 nt, synthetic construct
  source 1..19: mol_type = other RNA
  modified_base 1: mod_base = OTHER; note = 2'-fluoroguanosine-3'-phosphorothioate
  modified_base 2: mod_base = OTHER; note = 2'-O-methylguanosine-3'-phosphorothioate
  modified_base 3: mod_base = OTHER; note = 2'-fluoroadenosine-3'-phosphate
  modified_base 4: mod_base = OTHER; note = 2'-O-methylcytidine-3'-phosphate
  modified_base 5: mod_base = OTHER; note = 2'-fluorocytidine-3'-phosphate
  modified_base 6: mod_base = OTHER; note = 2'-O-methyluridine-3'-phosphate
  modified_base 7: mod_base = OTHER; note = 2'-fluoroguanosine-3'-phosphate
  modified_base 8: mod_base = OTHER; note = 2'-O-methylcytidine-3'-phosphate
  modified_base 9: mod_base = OTHER; note = 2'-fluorouridine-3'-phosphate
  modified_base 10: mod_base = OTHER; note = 2'-O-methylguanosine-3'-phosphate
  modified_base 11: mod_base = OTHER; note = 2'-fluoroadenosine-3'-phosphate
  modified_base 12: mod_base = OTHER; note = 2'-O-methylcytidine-3'-phosphate
  modified_base 13: mod_base = OTHER; note = 2'-fluoroadenosine-3'-phosphate
  modified_base 14: mod_base = OTHER; note = 2'-O-methylcytidine-3'-phosphate
  modified_base 15: mod_base = OTHER; note = 2'-fluorouridine-3'-phosphate
  modified_base 16: mod_base = OTHER; note = 2'-O-methylguanosine-3'-phosphate
  modified_base 17: mod_base = OTHER; note = 2'-fluorocytidine-3'-phosphorothioate
  modified_base 18: mod_base = OTHER; note = 2'-O-methyluridine-3'-phosphorothioate
  modified_base 19: mod_base = OTHER; note = 2'-fluorouridine
ggacctgctgacactgctt

SEQ ID NO: 672 - RNA, 19 nt, synthetic construct
  source 1..19: mol_type = other RNA
  modified_base 1: mod_base = OTHER; note = 2'-fluoroadenosine-3'-phosphorothioate
  modified_base 2: mod_base = OTHER; note = 2'-O-methylcytidine-3'-phosphorothioate
  modified_base 3: mod_base = OTHER; note = 2'-fluorocytidine-3'-phosphate
  modified_base 4: mod_base = OTHER; note = 2'-O-methyluridine-3'-phosphate
  modified_base 5: mod_base = OTHER; note = 2'-fluoroguanosine-3'-phosphate
  modified_base 6: mod_base = OTHER; note = 2'-O-methylcytidine-3'-phosphate
  modified_base 7: mod_base = OTHER; note = 2'-fluorouridine-3'-phosphate
  modified_base 8: mod_base = OTHER; note = 2'-O-methylguanosine-3'-phosphate
  modified_base 9: mod_base = OTHER; note = 2'-fluoroadenosine-3'-phosphate
  modified_base 10: mod_base = OTHER; note = 2'-O-methylcytidine-3'-phosphate
  modified_base 11: mod_base = OTHER; note = 2'-fluoroadenosine-3'-phosphate
  modified_base 12: mod_base = OTHER; note = 2'-O-methylcytidine-3'-phosphate
  modified_base 13: mod_base = OTHER; note = 2'-fluorouridine-3'-phosphate
  modified_base 14: mod_base = OTHER; note = 2'-O-methylguanosine-3'-phosphate
  modified_base 15: mod_base = OTHER; note = 2'-fluorocytidine-3'-phosphate
  modified_base 16: mod_base = OTHER; note = 2'-O-methyluridine-3'-phosphate
  modified_base 17: mod_base = OTHER; note = 2'-fluoroguanosine-3'-phosphorothioate
  modified_base 18: mod_base = OTHER; note = 2'-O-methyladenosine-3'-phosphorothioate
  modified_base 19: mod_base = OTHER; note = 2'-fluorouridine
acctgctgacactgctgat

SEQ ID NO: 673 - RNA, 19 nt, synthetic construct
  source 1..19: mol_type = other RNA
  modified_base 1: mod_base = OTHER; note = 2'-fluorouridine-3'-phosphorothioate
  modified_base 2: mod_base = OTHER; note = 2'-O-methylguanosine-3'-phosphorothioate
  modified_base 3: mod_base = OTHER; note = 2'-fluorocytidine-3'-phosphate
  modified_base 4: mod_base = OTHER; note = 2'-O-methyluridine-3'-phosphate
  modified_base 5: mod_base = OTHER; note = 2'-fluoroguanosine-3'-phosphate
  modified_base 6: mod_base = OTHER; note = 2'-O-methyladenosine-3'-phosphate
  modified_base 7: mod_base = OTHER; note = 2'-fluorocytidine-3'-phosphate
  modified_base 8: mod_base = OTHER; note = 2'-O-methyladenosine-3'-phosphate
  modified_base 9: mod_base = OTHER; note = 2'-fluorocytidine-3'-phosphate
  modified_base 10: mod_base = OTHER; note = 2'-O-methyluridine-3'-phosphate
  modified_base 11: mod_base = OTHER; note = 2'-fluoroguanosine-3'-phosphate
  modified_base 12: mod_base = OTHER; note = 2'-O-methylcytidine-3'-phosphate
  modified_base 13: mod_base = OTHER; note = 2'-fluorouridine-3'-phosphate
  modified_base 14: mod_base = OTHER; note = 2'-O-methylguanosine-3'-phosphate
  modified_base 15: mod_base = OTHER; note = 2'-fluoroadenosine-3'-phosphate
  modified_base 16: mod_base = OTHER; note = 2'-O-methylguanosine-3'-phosphate
  modified_base 17: mod_base = OTHER; note = 2'-fluorocytidine-3'-phosphorothioate
  modified_base 18: mod_base = OTHER; note = 2'-O-methyladenosine-3'-phosphorothioate
  modified_base 19: mod_base = OTHER; note = 2'-fluoroadenosine
tgctgacactgctgagcaa

SEQ ID NO: 674 - RNA, 19 nt, synthetic construct
  source 1..19: mol_type = other RNA
  modified_base 1: mod_base = OTHER; note = 2'-fluoroguanosine-3'-phosphorothioate
  modified_base 2: mod_base = OTHER; note = 2'-O-methylcytidine-3'-phosphorothioate
  modified_base 3: mod_base = OTHER; note = 2'-fluorouridine-3'-phosphate
  modified_base 4: mod_base = OTHER; note = 2'-O-methylguanosine-3'-phosphate
  modified_base 5: mod_base = OTHER; note = 2'-fluoroadenosine-3'-phosphate
  modified_base 6: mod_base = OTHER; note = 2'-O-methylcytidine-3'-phosphate
  modified_base 7: mod_base = OTHER; note = 2'-fluoroadenosine-3'-phosphate
  modified_base 8: mod_base = OTHER; note = 2'-O-methylcytidine-3'-phosphate
  modified_base 9: mod_base = OTHER; note = 2'-fluorouridine-3'-phosphate
  modified_base 10: mod_base = OTHER; note = 2'-O-methylguanosine-3'-phosphate
  modified_base 11: mod_base = OTHER; note = 2'-fluorocytidine-3'-phosphate
  modified_base 12: mod_base = OTHER; note = 2'-O-methyluridine-3'-phosphate
  modified_base 13: mod_base = OTHER; note = 2'-fluoroguanosine-3'-phosphate
  modified_base 14: mod_base = OTHER; note = 2'-O-methyladenosine-3'-phosphate
  modified_base 15: mod_base = OTHER; note = 2'-fluoroguanosine-3'-phosphate
  modified_base 16: mod_base = OTHER; note = 2'-O-methylcytidine-3'-phosphate
  modified_base 17: mod_base = OTHER; note = 2'-fluoroadenosine-3'-phosphorothioate
  modified_base 18: mod_base = OTHER; note = 2'-O-methyladenosine-3'-phosphorothioate
  modified_base 19: mod_base = OTHER; note = 2'-fluorouridine
gctgacactgctgagcaat

SEQ ID NO: 675 - RNA, 19 nt, synthetic construct
  source 1..19: mol_type = other RNA
  modified_base 1: mod_base = OTHER; note = 2'-fluorocytidine-3'-phosphorothioate
  modified_base 2: mod_base = OTHER; note = 2'-O-methyluridine-3'-phosphorothioate
  modified_base 3: mod_base = OTHER; note = 2'-fluoroguanosine-3'-phosphate
  modified_base 4: mod_base = OTHER; note = 2'-O-methyladenosine-3'-phosphate
  modified_base 5: mod_base = OTHER; note = 2'-fluorocytidine-3'-phosphate
  modified_base 6: mod_base = OTHER; note = 2'-O-methyladenosine-3'-phosphate
  modified_base 7: mod_base = OTHER; note = 2'-fluorocytidine-3'-phosphate
  modified_base 8: mod_base = OTHER; note = 2'-O-methyluridine-3'-phosphate
  modified_base 9: mod_base = OTHER; note = 2'-fluoroguanosine-3'-phosphate
  modified_base 10: mod_base = OTHER; note = 2'-O-methylcytidine-3'-phosphate
  modified_base 11: mod_base = OTHER; note = 2'-fluorouridine-3'-phosphate
  modified_base 12: mod_base = OTHER; note = 2'-O-methylguanosine-3'-phosphate
  modified_base 13: mod_base = OTHER; note = 2'-fluoroadenosine-3'-phosphate
  modified_base 14: mod_base = OTHER; note = 2'-O-methylguanosine-3'-phosphate
  modified_base 15: mod_base = OTHER; note = 2'-fluorocytidine-3'-phosphate
  modified_base 16: mod_base = OTHER; note = 2'-O-methyladenosine-3'-phosphate
  modified_base 17: mod_base = OTHER; note = 2'-fluoroadenosine-3'-phosphorothioate
  modified_base 18: mod_base = OTHER; note = 2'-O-methylguanosine-3'-phosphorothioate
  modified_base 19: mod_base = OTHER; note = 2'-fluorouridine
ctgacactgctgagcaagt

SEQ ID NO: 676 - RNA, 19 nt, synthetic construct
  source 1..19: mol_type = other RNA
  modified_base 1: mod_base = OTHER; note = 2'-fluorouridine-3'-phosphorothioate
  modified_base 2: mod_base = OTHER; note = 2'-O-methylguanosine-3'-phosphorothioate
  modified_base 3: mod_base = OTHER; note = 2'-fluoroadenosine-3'-phosphate
  modified_base 4: mod_base = OTHER; note = 2'-O-methylcytidine-3'-phosphate
  modified_base 5: mod_base = OTHER; note = 2'-fluoroadenosine-3'-phosphate
  modified_base 6: mod_base = OTHER; note = 2'-O-methylcytidine-3'-phosphate
  modified_base 7: mod_base = OTHER; note = 2'-fluorouridine-3'-phosphate
  modified_base 8: mod_base = OTHER; note = 2'-O-methylguanosine-3'-phosphate
  modified_base 9: mod_base = OTHER; note = 2'-fluorocytidine-3'-phosphate
  modified_base 10: mod_base = OTHER; note = 2'-O-methyluridine-3'-phosphate
  modified_base 11: mod_base = OTHER; note = 2'-fluoroguanosine-3'-phosphate
  modified_base 12: mod_base = OTHER; note = 2'-O-methyladenosine-3'-phosphate
  modified_base 13: mod_base = OTHER; note = 2'-fluoroguanosine-3'-phosphate
  modified_base 14: mod_base = OTHER; note = 2'-O-methylcytidine-3'-phosphate
  modified_base 15: mod_base = OTHER; note = 2'-fluoroadenosine-3'-phosphate
  modified_base 16: mod_base = OTHER; note = 2'-O-methyladenosine-3'-phosphate
  modified_base 17: mod_base = OTHER; note = 2'-fluoroguanosine-3'-phosphorothioate
  modified_base 18: mod_base = OTHER; note = 2'-O-methyluridine-3'-phosphorothioate
  modified_base 19: mod_base = OTHER; note = 2'-fluorouridine
tgacactgctgagcaagtt

SEQ ID NO: 677 - RNA, 19 nt, synthetic construct
  source 1..19: mol_type = other RNA
  modified_base 1: mod_base = OTHER; note = 2'-fluoroadenosine-3'-phosphorothioate
  modified_base 2: mod_base = OTHER; note = 2'-O-methylcytidine-3'-phosphorothioate
  modified_base 3: mod_base = OTHER; note = 2'-fluoroadenosine-3'-phosphate
  modified_base 4: mod_base = OTHER; note = 2'-O-methylcytidine-3'-phosphate
  modified_base 5: mod_base = OTHER; note = 2'-fluorouridine-3'-phosphate
  modified_base 6: mod_base = OTHER; note = 2'-O-methylguanosine-3'-phosphate
  modified_base 7: mod_base = OTHER; note = 2'-fluorocytidine-3'-phosphate
  modified_base 8: mod_base = OTHER; note = 2'-O-methyluridine-3'-phosphate
  modified_base 9: mod_base = OTHER; note = 2'-fluoroguanosine-3'-phosphate
  modified_base 10: mod_base = OTHER; note = 2'-O-methyladenosine-3'-phosphate
  modified_base 11: mod_base = OTHER; note = 2'-fluoroguanosine-3'-phosphate
  modified_base 12: mod_base = OTHER; note = 2'-O-methylcytidine-3'-phosphate
  modified_base 13: mod_base = OTHER; note = 2'-fluoroadenosine-3'-phosphate
  modified_base 14: mod_base = OTHER; note = 2'-O-methyladenosine-3'-phosphate
  modified_base 15: mod_base = OTHER; note = 2'-fluoroguanosine-3'-phosphate
  modified_base 16: mod_base = OTHER; note = 2'-O-methyluridine-3'-phosphate
  modified_base 17: mod_base = OTHER; note = 2'-fluorouridine-3'-phosphorothioate
  modified_base 18: mod_base = OTHER; note = 2'-O-methyluridine-3'-phosphorothioate
  modified_base 19: mod_base = OTHER; note = 2'-fluoroadenosine
acactgctgagcaagttta

SEQ ID NO: 678 - RNA, 19 nt, synthetic construct
  source 1..19: mol_type = other RNA
  modified_base 1: mod_base = OTHER; note = 2'-fluoroguanosine-3'-phosphorothioate
  modified_base 2: mod_base = OTHER; note = 2'-O-methyladenosine-3'-phosphorothioate
  modified_base 3: mod_base = OTHER; note = 2'-fluoroguanosine-3'-phosphate
  modified_base 4: mod_base = OTHER; note = 2'-O-methylcytidine-3'-phosphate
  modified_base 5: mod_base = OTHER; note = 2'-fluoroguanosine-3'-phosphate
  modified_base 6: mod_base = OTHER; note = 2'-O-methylguanosine-3'-phosphate
  modified_base 7: mod_base = OTHER; note = 2'-fluoroadenosine-3'-phosphate
  modified_base 8: mod_base = OTHER; note = 2'-O-methyluridine-3'-phosphate
  modified_base 9: mod_base = OTHER; note = 2'-fluorouridine-3'-phosphate
  modified_base 10: mod_base = OTHER; note = 2'-O-methylcytidine-3'-phosphate
  modified_base 11: mod_base = OTHER; note = 2'-fluorocytidine-3'-phosphate
  modified_base 12: mod_base = OTHER; note = 2'-O-methylguanosine-3'-phosphate
  modified_base 13: mod_base = OTHER; note = 2'-fluoroguanosine-3'-phosphate
  modified_base 14: mod_base = OTHER; note = 2'-O-methylcytidine-3'-phosphate
  modified_base 15: mod_base = OTHER; note = 2'-fluorocytidine-3'-phosphate
  modified_base 16: mod_base = OTHER; note = 2'-O-methylguanosine-3'-phosphate
  modified_base 17: mod_base = OTHER; note = 2'-fluoroadenosine-3'-phosphorothioate
  modified_base 18: mod_base = OTHER; note = 2'-O-methylguanosine-3'-phosphorothioate
  modified_base 19: mod_base = OTHER; note = 2'-fluoroadenosine
gagcggattccggccgaga

SEQ ID NO: 679 - RNA, 19 nt, synthetic construct
  source 1..19: mol_type = other RNA
  modified_base 1: mod_base = OTHER; note = 2'-fluoroadenosine-3'-phosphorothioate
  modified_base 2: mod_base = OTHER; note = 2'-O-methylguanosine-3'-phosphorothioate
  modified_base 3: mod_base = OTHER; note = 2'-fluorocytidine-3'-phosphate
  modified_base 4: mod_base = OTHER; note = 2'-O-methylguanosine-3'-phosphate
  modified_base 5: mod_base = OTHER; note = 2'-fluoroguanosine-3'-phosphate
  modified_base 6: mod_base = OTHER; note = 2'-O-methyladenosine-3'-phosphate
  modified_base 7: mod_base = OTHER; note = 2'-fluorouridine-3'-phosphate
  modified_base 8: mod_base = OTHER; note = 2'-O-methyluridine-3'-phosphate
  modified_base 9: mod_base = OTHER; note = 2'-fluorocytidine-3'-phosphate
  modified_base 10: mod_base = OTHER; note = 2'-O-methylcytidine-3'-phosphate
  modified_base 11: mod_base = OTHER; note = 2'-fluoroguanosine-3'-phosphate
  modified_base 12: mod_base = OTHER; note = 2'-O-methylguanosine-3'-phosphate
  modified_base 13: mod_base = OTHER; note = 2'-fluorocytidine-3'-phosphate
  modified_base 14: mod_base = OTHER; note = 2'-O-methylcytidine-3'-phosphate
  modified_base 15: mod_base = OTHER; note = 2'-fluoroguanosine-3'-phosphate
  modified_base 16: mod_base = OTHER; note = 2'-O-methyladenosine-3'-phosphate
  modified_base 17: mod_base = OTHER; note = 2'-fluoroguanosine-3'-phosphorothioate
  modified_base 18: mod_base = OTHER; note = 2'-O-methyladenosine-3'-phosphorothioate
  modified_base 19: mod_base = OTHER; note = 2'-fluorouridine
agcggattccggccgagat

SEQ ID NO: 680 - RNA, 19 nt, synthetic construct
  source 1..19: mol_type = other RNA
  modified_base 1: mod_base = OTHER; note = 2'-fluorocytidine-3'-phosphorothioate
  modified_base 2: mod_base = OTHER; note = 2'-O-methylguanosine-3'-phosphorothioate
  modified_base 3: mod_base = OTHER; note = 2'-fluoroguanosine-3'-phosphate
  modified_base 4: mod_base = OTHER; note = 2'-O-methylcytidine-3'-phosphate
  modified_base 5: mod_base = OTHER; note = 2'-fluorocytidine-3'-phosphate
  modified_base 6: mod_base = OTHER; note = 2'-O-methylguanosine-3'-phosphate
  modified_base 7: mod_base = OTHER; note = 2'-fluoroadenosine-3'-phosphate
  modified_base 8: mod_base = OTHER; note = 2'-O-methylguanosine-3'-phosphate
  modified_base 9: mod_base = OTHER; note = 2'-fluoroadenosine-3'-phosphate
  modified_base 10: mod_base = OTHER; note = 2'-O-methyluridine-3'-phosphate
  modified_base 11: mod_base = OTHER; note = 2'-fluoroguanosine-3'-phosphate
  modified_base 12: mod_base = OTHER; note = 2'-O-methylguanosine-3'-phosphate
  modified_base 13: mod_base = OTHER; note = 2'-fluorocytidine-3'-phosphate
  modified_base 14: mod_base = OTHER; note = 2'-O-methylguanosine-3'-phosphate
  modified_base 15: mod_base = OTHER; note = 2'-fluorocytidine-3'-phosphate
  modified_base 16: mod_base = OTHER; note = 2'-O-methylguanosine-3'-phosphate
  modified_base 17: mod_base = OTHER; note = 2'-fluorocytidine-3'-phosphorothioate
  modified_base 18: mod_base = OTHER; note = 2'-O-methyluridine-3'-phosphorothioate
  modified_base 19: mod_base = OTHER; note = 2'-fluorouridine
cggccgagatggcgcgctt

SEQ ID NO: 681 - RNA, 19 nt, synthetic construct
  source 1..19: mol_type = other RNA
  modified_base 1: mod_base = OTHER; note = 2'-fluoroguanosine-3'-phosphorothioate
  modified_base 2: mod_base = OTHER; note = 2'-O-methylguanosine-3'-phosphorothioate
  modified_base 3: mod_base = OTHER; note = 2'-fluorocytidine-3'-phosphate
  modified_base 4: mod_base = OTHER; note = 2'-O-methylcytidine-3'-phosphate
  modified_base 5: mod_base = OTHER; note = 2'-fluoroguanosine-3'-phosphate
  modified_base 6: mod_base = OTHER; note = 2'-O-methyladenosine-3'-phosphate
  modified_base 7: mod_base = OTHER; note = 2'-fluoroguanosine-3'-phosphate
  modified_base 8: mod_base = OTHER; note = 2'-O-methyladenosine-3'-phosphate
  modified_base 9: mod_base = OTHER; note = 2'-fluorouridine-3'-phosphate
  modified_base 10: mod_base = OTHER; note = 2'-O-methylguanosine-3'-phosphate
  modified_base 11: mod_base = OTHER; note = 2'-fluoroguanosine-3'-phosphate
  modified_base 12: mod_base = OTHER; note = 2'-O-methylcytidine-3'-phosphate
  modified_base 13: mod_base = OTHER; note = 2'-fluoroguanosine-3'-phosphate
  modified_base 14: mod_base = OTHER; note = 2'-O-methylcytidine-3'-phosphate
  modified_base 15: mod_base = OTHER; note = 2'-fluoroguanosine-3'-phosphate
  modified_base 16: mod_base = OTHER; note = 2'-O-methylcytidine-3'-phosphate
  modified_base 17: mod_base = OTHER; note = 2'-fluorouridine-3'-phosphorothioate
  modified_base 18: mod_base = OTHER; note = 2'-O-methyluridine-3'-phosphorothioate
  modified_base 19: mod_base = OTHER; note = 2'-fluoroadenosine
ggccgagatggcgcgctta

SEQ ID NO: 682 - RNA, 19 nt, synthetic construct
  source 1..19: mol_type = other RNA
  modified_base 1: mod_base = OTHER; note = 2'-fluoroguanosine-3'-phosphorothioate
  modified_base 2: mod_base = OTHER; note = 2'-O-methylcytidine-3'-phosphorothioate
  modified_base 3: mod_base = OTHER; note = 2'-fluorocytidine-3'-phosphate
  modified_base 4: mod_base = OTHER; note = 2'-O-methylguanosine-3'-phosphate
  modified_base 5: mod_base = OTHER; note = 2'-fluoroadenosine-3'-phosphate
  modified_base 6: mod_base = OTHER; note = 2'-O-methylguanosine-3'-phosphate
  modified_base 7: mod_base = OTHER; note = 2'-fluoroadenosine-3'-phosphate
  modified_base 8: mod_base = OTHER; note = 2'-O-methyluridine-3'-phosphate
  modified_base 9: mod_base = OTHER; note = 2'-fluoroguanosine-3'-phosphate
  modified_base 10: mod_base = OTHER; note = 2'-O-methylguanosine-3'-phosphate
  modified_base 11: mod_base = OTHER; note = 2'-fluorocytidine-3'-phosphate
  modified_base 12: mod_base = OTHER; note = 2'-O-methylguanosine-3'-phosphate
  modified_base 13: mod_base = OTHER; note = 2'-fluorocytidine-3'-phosphate
  modified_base 14: mod_base = OTHER; note = 2'-O-methylguanosine-3'-phosphate
  modified_base 15: mod_base = OTHER; note = 2'-fluorocytidine-3'-phosphate
  modified_base 16: mod_base = OTHER; note = 2'-O-methyluridine-3'-phosphate
  modified_base 17: mod_base = OTHER; note = 2'-fluorouridine-3'-phosphorothioate
  modified_base 18: mod_base = OTHER; note = 2'-O-methylcytidine-3'-phosphorothioate
  modified_base 19: mod_base = OTHER; note = 2'-fluorouridine
gccgagatggcgcgcttct

SEQ ID NO: 683 - RNA, 19 nt, synthetic construct
  source 1..19: mol_type = other RNA
  modified_base 1: mod_base = OTHER; note = 2'-fluorocytidine-3'-phosphorothioate
  modified_base 2: mod_base = OTHER; note = 2'-O-methylcytidine-3'-phosphorothioate
  modified_base 3: mod_base = OTHER; note = 2'-fluoroguanosine-3'-phosphate
  modified_base 4: mod_base = OTHER; note = 2'-O-methyladenosine-3'-phosphate
  modified_base 5: mod_base = OTHER; note = 2'-fluoroguanosine-3'-phosphate
  modified_base 6: mod_base = OTHER; note = 2'-O-methyladenosine-3'-phosphate
  modified_base 7: mod_base = OTHER; note = 2'-fluorouridine-3'-phosphate
  modified_base 8: mod_base = OTHER; note = 2'-O-methylguanosine-3'-phosphate
  modified_base 9: mod_base = OTHER; note = 2'-fluoroguanosine-3'-phosphate
  modified_base 10: mod_base = OTHER; note = 2'-O-methylcytidine-3'-phosphate
  modified_base 11: mod_base = OTHER; note = 2'-fluoroguanosine-3'-phosphate
  modified_base 12: mod_base = OTHER; note = 2'-O-methylcytidine-3'-phosphate
  modified_base 13: mod_base = OTHER; note = 2'-fluoroguanosine-3'-phosphate
  modified_base 14: mod_base = OTHER; note = 2'-O-methylcytidine-3'-phosphate
  modified_base 15: mod_base = OTHER; note = 2'-fluorouridine-3'-phosphate
  modified_base 16: mod_base = OTHER; note = 2'-O-methyluridine-3'-phosphate
  modified_base 17: mod_base = OTHER; note = 2'-fluorocytidine-3'-phosphorothioate
  modified_base 18: mod_base = OTHER; note = 2'-O-methyluridine-3'-phosphorothioate
  modified_base 19: mod_base = OTHER; note = 2'-fluoroadenosine
ccgagatggcgcgcttcta

SEQ ID NO: 684 - RNA, 19 nt, synthetic construct
  source 1..19: mol_type = other RNA
  modified_base 1: mod_base = OTHER; note = 2'-fluorocytidine-3'-phosphorothioate
  modified_base 2: mod_base = OTHER; note = 2'-O-methylguanosine-3'-phosphorothioate
  modified_base 3: mod_base = OTHER; note = 2'-fluoroadenosine-3'-phosphate
  modified_base 4: mod_base = OTHER; note = 2'-O-methylguanosine-3'-phosphate
  modified_base 5: mod_base = OTHER; note = 2'-fluoroadenosine-3'-phosphate
  modified_base 6: mod_base = OTHER; note = 2'-O-methyluridine-3'-phosphate
  modified_base 7: mod_base = OTHER; note = 2'-fluoroguanosine-3'-phosphate
  modified_base 8: mod_base = OTHER; note = 2'-O-methylguanosine-3'-phosphate
  modified_base 9: mod_base = OTHER; note = 2'-fluorocytidine-3'-phosphate
  modified_base 10: mod_base = OTHER; note = 2'-O-methylguanosine-3'-phosphate
  modified_base 11: mod_base = OTHER; note = 2'-fluorocytidine-3'-phosphate
  modified_base 12: mod_base = OTHER; note = 2'-O-methylguanosine-3'-phosphate
  modified_base 13: mod_base = OTHER; note = 2'-fluorocytidine-3'-phosphate
  modified_base 14: mod_base = OTHER; note = 2'-O-methyluridine-3'-phosphate
  modified_base 15: mod_base = OTHER; note = 2'-fluorouridine-3'-phosphate
  modified_base 16: mod_base = OTHER; note = 2'-O-methylcytidine-3'-phosphate
  modified_base 17: mod_base = OTHER; note = 2'-fluorouridine-3'-phosphorothioate
  modified_base 18: mod_base = OTHER; note = 2'-O-methyladenosine-3'-phosphorothioate
  modified_base 19: mod_base = OTHER; note = 2'-fluorouridine
cgagatggcgcgcttctat

SEQ ID NO: 685 - RNA, 19 nt, synthetic construct
  source 1..19: mol_type = other RNA
  modified_base 1: mod_base = OTHER; note = 2'-fluoroguanosine-3'-phosphorothioate
  modified_base 2: mod_base = OTHER; note = 2'-O-methylcytidine-3'-phosphorothioate
  modified_base 3: mod_base = OTHER; note = 2'-fluorouridine-3'-phosphate
  modified_base 4: mod_base = OTHER; note = 2'-O-methyluridine-3'-phosphate
  modified_base 5: mod_base = OTHER; note = 2'-fluorocytidine-3'-phosphate
  modified_base 6: mod_base = OTHER; note = 2'-O-methyluridine-3'-phosphate
  modified_base 7: mod_base = OTHER; note = 2'-fluoroadenosine-3'-phosphate
  modified_base 8: mod_base = OTHER; note = 2'-O-methylcytidine-3'-phosphate
  modified_base 9: mod_base = OTHER; note = 2'-fluorocytidine-3'-phosphate
  modified_base 10: mod_base = OTHER; note = 2'-O-methyluridine-3'-phosphate
  modified_base 11: mod_base = OTHER; note = 2'-fluoroguanosine-3'-phosphate
  modified_base 12: mod_base = OTHER; note = 2'-O-methylguanosine-3'-phosphate
  modified_base 13: mod_base = OTHER; note = 2'-fluorocytidine-3'-phosphate
  modified_base 14: mod_base = OTHER; note = 2'-O-methylguanosine-3'-phosphate
  modified_base 15: mod_base = OTHER; note = 2'-fluoroguanosine-3'-phosphate
  modified_base 16: mod_base = OTHER; note = 2'-O-methyladenosine-3'-phosphate
  modified_base 17: mod_base = OTHER; note = 2'-fluoroguanosine-3'-phosphorothioate
  modified_base 18: mod_base = OTHER; note = 2'-O-methyladenosine-3'-phosphorothioate
  modified_base 19: mod_base = OTHER; note = 2'-fluorouridine
gcttctacctggcggagat

SEQ ID NO: 686 - RNA, 19 nt, synthetic construct
  source 1..19: mol_type = other RNA
  modified_base 1: mod_base = OTHER; note = 2'-fluorocytidine-3'-phosphorothioate
  modified_base 2: mod_base = OTHER; note = 2'-O-methyluridine-3'-phosphorothioate
  modified_base 3: mod_base = OTHER; note = 2'-fluorouridine-3'-phosphate
  modified_base 4: mod_base = OTHER; note = 2'-O-methylcytidine-3'-phosphate
  modified_base 5: mod_base = OTHER; note = 2'-fluorouridine-3'-phosphate
  modified_base 6: mod_base = OTHER; note = 2'-O-methyladenosine-3'-phosphate
  modified_base 7: mod_base = OTHER; note = 2'-fluorocytidine-3'-phosphate
  modified_base 8: mod_base = OTHER; note = 2'-O-methylcytidine-3'-phosphate
  modified_base 9: mod_base = OTHER; note = 2'-fluorouridine-3'-phosphate
  modified_base 10: mod_base = OTHER; note = 2'-O-methylguanosine-3'-phosphate
  modified_base 11: mod_base = OTHER; note = 2'-fluoroguanosine-3'-phosphate
  modified_base 12: mod_base = OTHER; note = 2'-O-methylcytidine-3'-phosphate
  modified_base 13: mod_base = OTHER; note = 2'-fluoroguanosine-3'-phosphate
  modified_base 14: mod_base = OTHER; note = 2'-O-methylguanosine-3'-phosphate
  modified_base 15: mod_base = OTHER; note = 2'-fluoroadenosine-3'-phosphate
  modified_base 16: mod_base = OTHER; note = 2'-O-methylguanosine-3'-phosphate
  modified_base 17: mod_base = OTHER; note = 2'-fluoroadenosine-3'-phosphorothioate
  modified_base 18: mod_base = OTHER; note = 2'-O-methyluridine-3'-phosphorothioate
  modified_base 19: mod_base = OTHER; note = 2'-fluorouridine
cttctacctggcggagatt

SEQ ID NO: 687 - RNA, 19 nt, synthetic construct
  source 1..19: mol_type = other RNA
  modified_base 1: mod_base = OTHER; note = 2'-fluorouridine-3'-phosphorothioate
  modified_base 2: mod_base = OTHER; note = 2'-O-methyluridine-3'-phosphorothioate
  modified_base 3: mod_base = OTHER; note = 2'-fluorocytidine-3'-phosphate
  modified_base 4: mod_base = OTHER; note = 2'-O-methyluridine-3'-phosphate
  modified_base 5: mod_base = OTHER; note = 2'-fluoroadenosine-3'-phosphate
  modified_base 6: mod_base = OTHER; note = 2'-O-methylcytidine-3'-phosphate
  modified_base 7: mod_base = OTHER; note = 2'-fluorocytidine-3'-phosphate
  modified_base 8: mod_base = OTHER; note = 2'-O-methyluridine-3'-phosphate
  modified_base 9: mod_base = OTHER; note = 2'-fluoroguanosine-3'-phosphate
  modified_base 10: mod_base = OTHER; note = 2'-O-methylguanosine-3'-phosphate
  modified_base 11: mod_base = OTHER; note = 2'-fluorocytidine-3'-phosphate
  modified_base 12: mod_base = OTHER; note = 2'-O-methylguanosine-3'-phosphate
  modified_base 13: mod_base = OTHER; note = 2'-fluoroguanosine-3'-phosphate
  modified_base 14: mod_base = OTHER; note = 2'-O-methyladenosine-3'-phosphate
  modified_base 15: mod_base = OTHER; note = 2'-fluoroguanosine-3'-phosphate
  modified_base 16: mod_base = OTHER; note = 2'-O-methyladenosine-3'-phosphate
  modified_base 17: mod_base = OTHER; note = 2'-fluorouridine-3'-phosphorothioate
  modified_base 18: mod_base = OTHER; note = 2'-O-methyluridine-3'-phosphorothioate
  modified_base 19: mod_base = OTHER; note = 2'-fluoroadenosine
ttctacctggcggagatta

SEQ ID NO: 688 - RNA, 19 nt, synthetic construct
  source 1..19: mol_type = other RNA
  modified_base 1: mod_base = OTHER; note = 2'-fluorouridine-3'-phosphorothioate
  modified_base 2: mod_base = OTHER; note = 2'-O-methylcytidine-3'-phosphorothioate
  modified_base 3: mod_base = OTHER; note = 2'-fluorouridine-3'-phosphate
  modified_base 4: mod_base = OTHER; note = 2'-O-methyladenosine-3'-phosphate
  modified_base 5: mod_base = OTHER; note = 2'-fluorocytidine-3'-phosphate
  modified_base 6: mod_base = OTHER; note = 2'-O-methylcytidine-3'-phosphate
  modified_base 7: mod_base = OTHER; note = 2'-fluorouridine-3'-phosphate
  modified_base 8: mod_base = OTHER; note = 2'-O-methylguanosine-3'-phosphate
  modified_base 9: mod_base = OTHER; note = 2'-fluoroguanosine-3'-phosphate
  modified_base 10: mod_base = OTHER; note = 2'-O-methylcytidine-3'-phosphate
  modified_base 11: mod_base = OTHER; note = 2'-fluoroguanosine-3'-phosphate
  modified_base 12: mod_base = OTHER; note = 2'-O-methylguanosine-3'-phosphate
  modified_base 13: mod_base = OTHER; note = 2'-fluoroadenosine-3'-phosphate
  modified_base 14: mod_base = OTHER; note = 2'-O-methylguanosine-3'-phosphate
  modified_base 15: mod_base = OTHER; note = 2'-fluoroadenosine-3'-phosphate
  modified_base 16: mod_base = OTHER; note = 2'-O-methyluridine-3'-phosphate
  modified_base 17: mod_base = OTHER; note = 2'-fluorouridine-3'-phosphorothioate
  modified_base 18: mod_base = OTHER; note = 2'-O-methylguanosine-3'-phosphorothioate
  modified_base 19: mod_base = OTHER; note = 2'-fluorouridine
tctacctggcggagattgt

SEQ ID NO: 689 - RNA, 19 nt, synthetic construct
  source 1..19: mol_type = other RNA
  modified_base 1: mod_base = OTHER; note = 2'-fluorocytidine-3'-phosphorothioate
  modified_base 2: mod_base = OTHER; note = 2'-O-methyluridine-3'-phosphorothioate
  modified_base 3: mod_base = OTHER; note = 2'-fluoroadenosine-3'-phosphate
  modified_base 4: mod_base = OTHER; note = 2'-O-methylcytidine-3'-phosphate
  modified_base 5: mod_base = OTHER; note = 2'-fluorocytidine-3'-phosphate
  modified_base 6: mod_base = OTHER; note = 2'-O-methyluridine-3'-phosphate
  modified_base 7: mod_base = OTHER; note = 2'-fluoroguanosine-3'-phosphate
  modified_base 8: mod_base = OTHER; note = 2'-O-methylguanosine-3'-phosphate
  modified_base 9: mod_base = OTHER; note = 2'-fluorocytidine-3'-phosphate
  modified_base 10: mod_base = OTHER; note = 2'-O-methylguanosine-3'-phosphate
  modified_base 11: mod_base = OTHER; note = 2'-fluoroguanosine-3'-phosphate
  modified_base 12: mod_base = OTHER; note = 2'-O-methyladenosine-3'-phosphate
  modified_base 13: mod_base = OTHER; note = 2'-fluoroguanosine-3'-phosphate
  modified_base 14: mod_base = OTHER; note = 2'-O-methyladenosine-3'-phosphate
  modified_base 15: mod_base = OTHER; note = 2'-fluorouridine-3'-phosphate
  modified_base 16: mod_base = OTHER; note = 2'-O-methyluridine-3'-phosphate
  modified_base 17: mod_base = OTHER; note = 2'-fluoroguanosine-3'-phosphorothioate
  modified_base 18: mod_base = OTHER; note = 2'-O-methyluridine-3'-phosphorothioate
  modified_base 19: mod_base = OTHER; note = 2'-fluorouridine
ctacctggcggagattgtt

SEQ ID NO: 690 - RNA, 19 nt, synthetic construct
  source 1..19: mol_type = other RNA
  modified_base 1: mod_base = OTHER; note = 2'-fluoroadenosine-3'-phosphorothioate
  modified_base 2: mod_base = OTHER; note = 2'-O-methylcytidine-3'-phosphorothioate
  modified_base 3: mod_base = OTHER; note = 2'-fluorocytidine-3'-phosphate
  modified_base 4: mod_base = OTHER; note = 2'-O-methyluridine-3'-phosphate
  modified_base 5: mod_base = OTHER; note = 2'-fluoroguanosine-3'-phosphate
  modified_base 6: mod_base = OTHER; note = 2'-O-methylguanosine-3'-phosphate
  modified_base 7: mod_base = OTHER; note = 2'-fluorocytidine-3'-phosphate
  modified_base 8: mod_base = OTHER; note = 2'-O-methylguanosine-3'-phosphate
  modified_base 9: mod_base = OTHER; note = 2'-fluoroguanosine-3'-phosphate
  modified_base 10: mod_base = OTHER; note = 2'-O-methyladenosine-3'-phosphate
  modified_base 11: mod_base = OTHER; note = 2'-fluoroguanosine-3'-phosphate
  modified_base 12: mod_base = OTHER; note = 2'-O-methyladenosine-3'-phosphate
  modified_base 13: mod_base = OTHER; note = 2'-fluorouridine-3'-phosphate
  modified_base 14: mod_base = OTHER; note = 2'-O-methyluridine-3'-phosphate
  modified_base 15: mod_base = OTHER; note = 2'-fluoroguanosine-3'-phosphate
  modified_base 16: mod_base = OTHER; note = 2'-O-methyluridine-3'-phosphate
  modified_base 17: mod_base = OTHER; note = 2'-fluorocytidine-3'-phosphorothioate
  modified_base 18: mod_base = OTHER; note = 2'-O-methyladenosine-3'-phosphorothioate
  modified_base 19: mod_base = OTHER; note = 2'-fluorouridine
acctggcggagattgtcat

SEQ ID NO: 691 - RNA, 19 nt, synthetic construct
  source 1..19: mol_type = other RNA
  modified_base 1: mod_base = OTHER; note = 2'-fluorocytidine-3'-phosphorothioate
  modified_base 2: mod_base = OTHER; note = 2'-O-methylcytidine-3'-phosphorothioate
  modified_base 3: mod_base = OTHER; note = 2'-fluorouridine-3'-phosphate
  modified_base 4: mod_base = OTHER; note = 2'-O-methylguanosine-3'-phosphate
  modified_base 5: mod_base = OTHER; note = 2'-fluoroguanosine-3'-phosphate
  modified_base 6: mod_base = OTHER; note = 2'-O-methylcytidine-3'-phosphate
  modified_base 7: mod_base = OTHER; note = 2'-fluoroguanosine-3'-phosphate
  modified_base 8: mod_base = OTHER; note = 2'-O-methylguanosine-3'-phosphate
  modified_base 9: mod_base = OTHER; note = 2'-fluoroadenosine-3'-phosphate
  modified_base 10: mod_base = OTHER; note = 2'-O-methylguanosine-3'-phosphate
  modified_base 11: mod_base = OTHER; note = 2'-fluoroadenosine-3'-phosphate
  modified_base 12: mod_base = OTHER; note = 2'-O-methyluridine-3'-phosphate
  modified_base 13: mod_base = OTHER; note = 2'-fluorouridine-3'-phosphate
  modified_base 14: mod_base = OTHER; note = 2'-O-methylguanosine-3'-phosphate
  modified_base 15: mod_base = OTHER; note = 2'-fluorouridine-3'-phosphate
  modified_base 16: mod_base = OTHER; note = 2'-O-methylcytidine-3'-phosphate
  modified_base 17: mod_base = OTHER; note = 2'-fluoroadenosine-3'-phosphorothioate
  modified_base 18: mod_base = OTHER; note = 2'-O-methyluridine-3'-phosphorothioate
  modified_base 19: mod_base = OTHER; note = 2'-fluoroguanosine
cctggcggagattgtcatg

SEQ ID NO: 692 - RNA, 19 nt, synthetic construct
  source 1..19: mol_type = other RNA
  modified_base 1: mod_base = OTHER; note = 2'-fluorocytidine-3'-phosphorothioate
  modified_base 2: mod_base = OTHER; note = 2'-O-methylguanosine-3'-phosphorothioate
  modified_base 3: mod_base = OTHER; note = 2'-fluoroguanosine-3'-phosphate
  modified_base 4: mod_base = OTHER; note = 2'-O-methyladenosine-3'-phosphate
  modified_base 5: mod_base = OTHER; note = 2'-fluoroguanosine-3'-phosphate
  modified_base 6: mod_base = OTHER; note = 2'-O-methyladenosine-3'-phosphate
  modified_base 7: mod_base = OTHER; note = 2'-fluorouridine-3'-phosphate
  modified_base 8: mod_base = OTHER; note = 2'-O-methyluridine-3'-phosphate
  modified_base 9: mod_base = OTHER; note = 2'-fluoroguanosine-3'-phosphate
  modified_base 10: mod_base = OTHER; note = 2'-O-methyluridine-3'-phosphate
  modified_base 11: mod_base = OTHER; note = 2'-fluorocytidine-3'-phosphate
  modified_base 12: mod_base = OTHER; note = 2'-O-methyladenosine-3'-phosphate
  modified_base 13: mod_base = OTHER; note = 2'-fluorouridine-3'-phosphate
  modified_base 14: mod_base = OTHER; note = 2'-O-methylguanosine-3'-phosphate
  modified_base 15: mod_base = OTHER; note = 2'-fluoroguanosine-3'-phosphate
  modified_base 16: mod_base = OTHER; note = 2'-O-methylcytidine-3'-phosphate
  modified_base 17: mod_base = OTHER; note = 2'-fluorocytidine-3'-phosphorothioate
  modified_base 18: mod_base = OTHER; note = 2'-O-methyladenosine-3'-phosphorothioate
  modified_base 19: mod_base = OTHER; note = 2'-fluorouridine
cggagattgtcatggccat

SEQ ID NO: 693 - RNA, 19 nt, synthetic construct
  source 1..19: mol_type = other RNA
  modified_base 1: mod_base = OTHER; note = 2'-fluoroguanosine-3'-phosphorothioate
  modified_base 2: mod_base = OTHER; note = 2'-O-methylguanosine-3'-phosphorothioate
  modified_base 3: mod_base = OTHER; note = 2'-fluoroadenosine-3'-phosphate
  modified_base 4: mod_base = OTHER; note = 2'-O-methylguanosine-3'-phosphate
  modified_base 5: mod_base = OTHER; note = 2'-fluoroadenosine-3'-phosphate
  modified_base 6: mod_base = OTHER; note = 2'-O-methyluridine-3'-phosphate
  modified_base 7: mod_base = OTHER; note = 2'-fluorouridine-3'-phosphate
  modified_base 8: mod_base = OTHER; note = 2'-O-methylguanosine-3'-phosphate
  modified_base 9: mod_base = OTHER; note = 2'-fluorouridine-3'-phosphate
  modified_base 10: mod_base = OTHER; note = 2'-O-methylcytidine-3'-phosphate
  modified_base 11: mod_base = OTHER; note = 2'-fluoroadenosine-3'-phosphate
  modified_base 12: mod_base = OTHER; note = 2'-O-methyluridine-3'-phosphate
  modified_base 13: mod_base = OTHER; note = 2'-fluoroguanosine-3'-phosphate
  modified_base 14: mod_base = OTHER; note = 2'-O-methylguanosine-3'-phosphate
  modified_base 15: mod_base = OTHER; note = 2'-fluorocytidine-3'-phosphate
  modified_base 16: mod_base = OTHER; note = 2'-O-methylcytidine-3'-phosphate
  modified_base 17: mod_base = OTHER; note = 2'-fluoroadenosine-3'-phosphorothioate
  modified_base 18: mod_base = OTHER; note = 2'-O-methyluridine-3'-phosphorothioate
  modified_base 19: mod_base = OTHER; note = 2'-fluoroadenosine
ggagattgtcatggccata

SEQ ID NO: 694 - RNA, 19 nt, synthetic construct
  source 1..19: mol_type = other RNA
  modified_base 1: mod_base = OTHER; note = 2'-fluoroguanosine-3'-phosphorothioate
  modified_base 2: mod_base = OTHER; note = 2'-O-methylguanosine-3'-phosphorothioate
  modified_base 3: mod_base = OTHER; note = 2'-fluoroguanosine-3'-phosphate
  modified_base 4: mod_base = OTHER; note = 2'-O-methyladenosine-3'-phosphate
  modified_base 5: mod_base = OTHER; note = 2'-fluorocytidine-3'-phosphate
  modified_base 6: mod_base = OTHER; note = 2'-O-methyladenosine-3'-phosphate
  modified_base 7: mod_base = OTHER; note = 2'-fluorouridine-3'-phosphate
  modified_base 8: mod_base = OTHER; note = 2'-O-methylcytidine-3'-phosphate
  modified_base 9: mod_base = OTHER; note = 2'-fluoroadenosine-3'-phosphate
  modified_base 10: mod_base = OTHER; note = 2'-O-methyladenosine-3'-phosphate
  modified_base 11: mod_base = OTHER; note = 2'-fluoroadenosine-3'-phosphate
  modified_base 12: mod_base = OTHER; note = 2'-O-methylcytidine-3'-phosphate
  modified_base 13: mod_base = OTHER; note = 2'-fluorocytidine-3'-phosphate
  modified_base 14: mod_base = OTHER; note = 2'-O-methylcytidine-3'-phosphate
  modified_base 15: mod_base = OTHER; note = 2'-fluoroguanosine-3'-phosphate
  modified_base 16: mod_base = OTHER; note = 2'-O-methyladenosine-3'-phosphate
  modified_base 17: mod_base = OTHER; note = 2'-fluorocytidine-3'-phosphorothioate
  modified_base 18: mod_base = OTHER; note = 2'-O-methyladenosine-3'-phosphorothioate
  modified_base 19: mod_base = OTHER; note = 2'-fluoroadenosine
gggacatcaaacccgacaa

SEQ ID NO: 695 - RNA, 19 nt, synthetic construct
  source 1..19: mol_type = other RNA
  modified_base 1: mod_base = OTHER; note = 2'-fluoroguanosine-3'-phosphorothioate
  modified_base 2: mod_base = OTHER; note = 2'-O-methylguanosine-3'-phosphorothioate
  modified_base 3: mod_base = OTHER; note = 2'-fluoroadenosine-3'-phosphate
  modified_base 4: mod_base = OTHER; note = 2'-O-methylcytidine-3'-phosphate
  modified_base 5: mod_base = OTHER; note = 2'-fluoroadenosine-3'-phosphate
  modified_base 6: mod_base = OTHER; note = 2'-O-methyluridine-3'-phosphate
  modified_base 7: mod_base = OTHER; note = 2'-fluorocytidine-3'-phosphate
  modified_base 8: mod_base = OTHER; note = 2'-O-methyladenosine-3'-phosphate
  modified_base 9: mod_base = OTHER; note = 2'-fluoroadenosine-3'-phosphate
  modified_base 10: mod_base = OTHER; note = 2'-O-methyladenosine-3'-phosphate
  modified_base 11: mod_base = OTHER; note = 2'-fluorocytidine-3'-phosphate
  modified_base 12: mod_base = OTHER; note = 2'-O-methylcytidine-3'-phosphate
  modified_base 13: mod_base = OTHER; note = 2'-fluorocytidine-3'-phosphate
  modified_base 14: mod_base = OTHER; note = 2'-O-methylguanosine-3'-phosphate
  modified_base 15: mod_base = OTHER; note = 2'-fluoroadenosine-3'-phosphate
  modified_base 16: mod_base = OTHER; note = 2'-O-methylcytidine-3'-phosphate
  modified_base 17: mod_base = OTHER; note = 2'-fluoroadenosine-3'-phosphorothioate
  modified_base 18: mod_base = OTHER; note = 2'-O-methyladenosine-3'-phosphorothioate
  modified_base 19: mod_base = OTHER; note = 2'-fluorouridine
ggacatcaaacccgacaat

SEQ ID NO: 696 - RNA, 19 nt, synthetic construct
  source 1..19: mol_type = other RNA
  modified_base 1: mod_base = OTHER; note = 2'-fluoroguanosine-3'-phosphorothioate
  modified_base 2: mod_base = OTHER; note = 2'-O-methyladenosine-3'-phosphorothioate
  modified_base 3: mod_base = OTHER; note = 2'-fluorocytidine-3'-phosphate
  modified_base 4: mod_base = OTHER; note = 2'-O-methyladenosine-3'-phosphate
  modified_base 5: mod_base = OTHER; note = 2'-fluorouridine-3'-phosphate
  modified_base 6: mod_base = OTHER; note = 2'-O-methylcytidine-3'-phosphate
  modified_base 7: mod_base = OTHER; note = 2'-fluoroadenosine-3'-phosphate
  modified_base 8: mod_base = OTHER; note = 2'-O-methyladenosine-3'-phosphate
  modified_base 9: mod_base = OTHER; note = 2'-fluoroadenosine-3'-phosphate
  modified_base 10: mod_base = OTHER; note = 2'-O-methylcytidine-3'-phosphate
  modified_base 11: mod_base = OTHER; note = 2'-fluorocytidine-3'-phosphate
  modified_base 12: mod_base = OTHER; note = 2'-O-methylcytidine-3'-phosphate
  modified_base 13: mod_base = OTHER; note = 2'-fluoroguanosine-3'-phosphate
  modified_base 14: mod_base = OTHER; note = 2'-O-methyladenosine-3'-phosphate
  modified_base 15: mod_base = OTHER; note = 2'-fluorocytidine-3'-phosphate
  modified_base 16: mod_base = OTHER; note = 2'-O-methyladenosine-3'-phosphate
  modified_base 17: mod_base = OTHER; note = 2'-fluoroadenosine-3'-phosphorothioate
  modified_base 18: mod_base = OTHER; note = 2'-O-methylcytidine-3'-phosphorothioate
  modified_base 19: mod_base = OTHER; note = 2'-fluoroadenosine
gacatcaaacccgacaaca

SEQ ID NO: 697 - RNA, 19 nt, synthetic construct
  source 1..19: mol_type = other RNA
  modified_base 1: mod_base = OTHER; note = 2'-fluoroadenosine-3'-phosphorothioate
  modified_base 2: mod_base = OTHER; note = 2'-O-methylcytidine-3'-phosphorothioate
  modified_base 3: mod_base = OTHER; note = 2'-fluoroadenosine-3'-phosphate
  modified_base 4: mod_base = OTHER; note = 2'-O-methyluridine-3'-phosphate
  modified_base 5: mod_base = OTHER; note = 2'-fluorocytidine-3'-phosphate
  modified_base 6: mod_base = OTHER; note = 2'-O-methyladenosine-3'-phosphate
  modified_base 7: mod_base = OTHER; note = 2'-fluoroadenosine-3'-phosphate
  modified_base 8: mod_base = OTHER; note = 2'-O-methyladenosine-3'-phosphate
  modified_base 9: mod_base = OTHER; note = 2'-fluorocytidine-3'-phosphate
  modified_base 10: mod_base = OTHER; note = 2'-O-methylcytidine-3'-phosphate
  modified_base 11: mod_base = OTHER; note = 2'-fluorocytidine-3'-phosphate
  modified_base 12: mod_base = OTHER; note = 2'-O-methylguanosine-3'-phosphate
  modified_base 13: mod_base = OTHER; note = 2'-fluoroadenosine-3'-phosphate
  modified_base 14: mod_base = OTHER; note = 2'-O-methylcytidine-3'-phosphate
  modified_base 15: mod_base = OTHER; note = 2'-fluoroadenosine-3'-phosphate
  modified_base 16: mod_base = OTHER; note = 2'-O-methyladenosine-3'-phosphate
  modified_base 17: mod_base = OTHER; note = 2'-fluorocytidine-3'-phosphorothioate
  modified_base 18: mod_base = OTHER; note = 2'-O-methyladenosine-3'-phosphorothioate
  modified_base 19: mod_base = OTHER; note = 2'-fluorouridine
acatcaaacccgacaacat

SEQ ID NO: 698 - RNA, 19 nt, synthetic construct
  source 1..19: mol_type = other RNA
  modified_base 1: mod_base = OTHER; note = 2'-fluorocytidine-3'-phosphorothioate
  modified_base 2: mod_base = OTHER; note = 2'-O-methyladenosine-3'-phosphorothioate
  modified_base 3: mod_base = OTHER; note = 2'-fluorouridine-3'-phosphate
  modified_base 4: mod_base = OTHER; note = 2'-O-methylcytidine-3'-phosphate
  modified_base 5: mod_base = OTHER; note = 2'-fluoroadenosine-3'-phosphate
  modified_base 6: mod_base = OTHER; note = 2'-O-methyladenosine-3'-phosphate
  modified_base 7: mod_base = OTHER; note = 2'-fluoroadenosine-3'-phosphate
  modified_base 8: mod_base = OTHER; note = 2'-O-methylcytidine-3'-phosphate
  modified_base 9: mod_base = OTHER; note = 2'-fluorocytidine-3'-phosphate
  modified_base 10: mod_base = OTHER; note = 2'-O-methylcytidine-3'-phosphate
  modified_base 11: mod_base = OTHER; note = 2'-fluoroguanosine-3'-phosphate
  modified_base 12: mod_base = OTHER; note = 2'-O-methyladenosine-3'-phosphate
  modified_base 13: mod_base = OTHER; note = 2'-fluorocytidine-3'-phosphate
  modified_base 14: mod_base = OTHER; note = 2'-O-methyladenosine-3'-phosphate
  modified_base 15: mod_base = OTHER; note = 2'-fluoroadenosine-3'-phosphate
  modified_base 16: mod_base = OTHER; note = 2'-O-methylcytidine-3'-phosphate
  modified_base 17: mod_base = OTHER; note = 2'-fluoroadenosine-3'-phosphorothioate
  modified_base 18: mod_base = OTHER; note = 2'-O-methyluridine-3'-phosphorothioate
  modified_base 19: mod_base = OTHER; note = 2'-fluorouridine
catcaaacccgacaacatt

SEQ ID NO: 699 - RNA, 19 nt, synthetic construct
  source 1..19: mol_type = other RNA
  modified_base 1: mod_base = OTHER; note = 2'-fluoroadenosine-3'-phosphorothioate
  modified_base 2: mod_base = OTHER; note = 2'-O-methylcytidine-3'-phosphorothioate
  modified_base 3: mod_base = OTHER; note = 2'-fluorocytidine-3'-phosphate
  modified_base 4: mod_base = OTHER; note = 2'-O-methylcytidine-3'-phosphate
  modified_base 5: mod_base = OTHER; note = 2'-fluoroguanosine-3'-phosphate
  modified_base 6: mod_base = OTHER; note = 2'-O-methyladenosine-3'-phosphate
  modified_base 7: mod_base = OTHER; note = 2'-fluorocytidine-3'-phosphate
  modified_base 8: mod_base = OTHER; note = 2'-O-methyladenosine-3'-phosphate
  modified_base 9: mod_base = OTHER; note = 2'-fluoroadenosine-3'-phosphate
  modified_base 10: mod_base = OTHER; note = 2'-O-methylcytidine-3'-phosphate
  modified_base 11: mod_base = OTHER; note = 2'-fluoroadenosine-3'-phosphate
  modified_base 12: mod_base = OTHER; note = 2'-O-methyluridine-3'-phosphate
  modified_base 13: mod_base = OTHER; note = 2'-fluorocytidine-3'-phosphate
  modified_base 14: mod_base = OTHER; note = 2'-O-methylcytidine-3'-phosphate
  modified_base 15: mod_base = OTHER; note = 2'-fluorouridine-3'-phosphate
  modified_base 16: mod_base = OTHER; note = 2'-O-methylguanosine-3'-phosphate
  modified_base 17: mod_base = OTHER; note = 2'-fluorocytidine-3'-phosphorothioate
  modified_base 18: mod_base = OTHER; note = 2'-O-methyluridine-3'-phosphorothioate
  modified_base 19: mod_base = OTHER; note = 2'-fluorouridine
acccgacaacatcctgctt

SEQ ID NO: 700 - RNA, 19 nt, synthetic construct
  source 1..19: mol_type = other RNA
  modified_base 1: mod_base = OTHER; note = 2'-fluorocytidine-3'-phosphorothioate
  modified_base 2: mod_base = OTHER; note = 2'-O-methylguanosine-3'-phosphorothioate
  modified_base 3: mod_base = OTHER; note = 2'-fluoroadenosine-3'-phosphate
  modified_base 4: mod_base = OTHER; note = 2'-O-methylcytidine-3'-phosphate
  modified_base 5: mod_base = OTHER; note = 2'-fluoroadenosine-3'-phosphate
  modified_base 6: mod_base = OTHER; note = 2'-O-methyladenosine-3'-phosphate
  modified_base 7: mod_base = OTHER; note = 2'-fluorocytidine-3'-phosphate
  modified_base 8: mod_base = OTHER; note = 2'-O-methyladenosine-3'-phosphate
  modified_base 9: mod_base = OTHER; note = 2'-fluorouridine-3'-phosphate
  modified_base 10: mod_base = OTHER; note = 2'-O-methylcytidine-3'-phosphate
  modified_base 11: mod_base = OTHER; note = 2'-fluorocytidine-3'-phosphate
  modified_base 12: mod_base = OTHER; note = 2'-O-methyluridine-3'-phosphate
  modified_base 13: mod_base = OTHER; note = 2'-fluoroguanosine-3'-phosphate
  modified_base 14: mod_base = OTHER; note = 2'-O-methylcytidine-3'-phosphate
  modified_base 15: mod_base = OTHER; note = 2'-fluorouridine-3'-phosphate
  modified_base 16: mod_base = OTHER; note = 2'-O-methylguanosine-3'-phosphate
  modified_base 17: mod_base = OTHER; note = 2'-fluoroguanosine-3'-phosphorothioate
  modified_base 18: mod_base = OTHER; note = 2'-O-methyladenosine-3'-phosphorothioate
  modified_base 19: mod_base = OTHER; note = 2'-fluorouridine
cgacaacatcctgctggat

SEQ ID NO: 701 - RNA, 19 nt, synthetic construct
  source 1..19: mol_type = other RNA
  modified_base 1: mod_base = OTHER; note = 2'-fluoroadenosine-3'-phosphorothioate
  modified_base 2: mod_base = OTHER; note = 2'-O-methylcytidine-3'-phosphorothioate
  modified_base 3: mod_base = OTHER; note = 2'-fluoroadenosine-3'-phosphate
  modified_base 4: mod_base = OTHER; note = 2'-O-methyluridine-3'-phosphate
  modified_base 5: mod_base = OTHER; note = 2'-fluorocytidine-3'-phosphate
  modified_base 6: mod_base = OTHER; note = 2'-O-methylcytidine-3'-phosphate
  modified_base 7: mod_base = OTHER; note = 2'-fluorouridine-3'-phosphate
  modified_base 8: mod_base = OTHER; note = 2'-O-methylguanosine-3'-phosphate
  modified_base 9: mod_base = OTHER; note = 2'-fluorocytidine-3'-phosphate
  modified_base 10: mod_base = OTHER; note = 2'-O-methyluridine-3'-phosphate
  modified_base 11: mod_base = OTHER; note = 2'-fluoroguanosine-3'-phosphate
  modified_base 12: mod_base = OTHER; note = 2'-O-methylguanosine-3'-phosphate
  modified_base 13: mod_base = OTHER; note = 2'-fluoroadenosine-3'-phosphate
  modified_base 14: mod_base = OTHER; note = 2'-O-methylcytidine-3'-phosphate
  modified_base 15: mod_base = OTHER; note = 2'-fluorocytidine-3'-phosphate
  modified_base 16: mod_base = OTHER; note = 2'-O-methylguanosine-3'-phosphate
  modified_base 17: mod_base = OTHER; note = 2'-fluorocytidine-3'-phosphorothioate
  modified_base 18: mod_base = OTHER; note = 2'-O-methyluridine-3'-phosphorothioate
  modified_base 19: mod_base = OTHER; note = 2'-fluorouridine
acatcctgctggaccgctt

SEQ ID NO: 702 - RNA, 19 nt, synthetic construct
  source 1..19: mol_type = other RNA
  modified_base 1: mod_base = OTHER; note = 2'-fluoroadenosine-3'-phosphorothioate
  modified_base 2: mod_base = OTHER; note = 2'-O-methyluridine-3'-phosphorothioate
  modified_base 3: mod_base = OTHER; note = 2'-fluorocytidine-3'-phosphate
  modified_base 4: mod_base = OTHER; note = 2'-O-methylcytidine-3'-phosphate
  modified_base 5: mod_base = OTHER; note = 2'-fluorouridine-3'-phosphate
  modified_base 6: mod_base = OTHER; note = 2'-O-methylguanosine-3'-phosphate
  modified_base 7: mod_base = OTHER; note = 2'-fluorocytidine-3'-phosphate
  modified_base 8: mod_base = OTHER; note = 2'-O-methyluridine-3'-phosphate
  modified_base 9: mod_base = OTHER; note = 2'-fluoroguanosine-3'-phosphate
  modified_base 10: mod_base = OTHER; note = 2'-O-methylguanosine-3'-phosphate
  modified_base 11: mod_base = OTHER; note = 2'-fluoroadenosine-3'-phosphate
  modified_base 12: mod_base = OTHER; note = 2'-O-methylcytidine-3'-phosphate
  modified_base 13: mod_base = OTHER; note = 2'-fluorocytidine-3'-phosphate
  modified_base 14: mod_base = OTHER; note = 2'-O-methylguanosine-3'-phosphate
  modified_base 15: mod_base = OTHER; note = 2'-fluorocytidine-3'-phosphate
  modified_base 16: mod_base = OTHER; note = 2'-O-methyluridine-3'-phosphate
  modified_base 17: mod_base = OTHER; note = 2'-fluoroguanosine-3'-phosphorothioate
  modified_base 18: mod_base = OTHER; note = 2'-O-methyluridine-3'-phosphorothioate
  modified_base 19: mod_base = OTHER; note = 2'-fluorouridine
atcctgctggaccgctgtt

SEQ ID NO: 703 - RNA, 19 nt, synthetic construct
  source 1..19: mol_type = other RNA
  modified_base 1: mod_base = OTHER; note = 2'-fluorouridine-3'-phosphorothioate
  modified_base 2: mod_base = OTHER; note = 2'-O-methylguanosine-3'-phosphorothioate
  modified_base 3: mod_base = OTHER; note = 2'-fluoroguanosine-3'-phosphate
  modified_base 4: mod_base = OTHER; note = 2'-O-methyladenosine-3'-phosphate
  modified_base 5: mod_base = OTHER; note = 2'-fluorocytidine-3'-phosphate
  modified_base 6: mod_base = OTHER; note = 2'-O-methylcytidine-3'-phosphate
  modified_base 7: mod_base = OTHER; note = 2'-fluoroguanosine-3'-phosphate
  modified_base 8: mod_base = OTHER; note = 2'-O-methylcytidine-3'-phosphate
  modified_base 9: mod_base = OTHER; note = 2'-fluorouridine-3'-phosphate
  modified_base 10: mod_base = OTHER; note = 2'-O-methylguanosine-3'-phosphate
  modified_base 11: mod_base = OTHER; note = 2'-fluorouridine-3'-phosphate
  modified_base 12: mod_base = OTHER; note = 2'-O-methylguanosine-3'-phosphate
  modified_base 13: mod_base = OTHER; note = 2'-fluoroguanosine-3'-phosphate
  modified_base 14: mod_base = OTHER; note = 2'-O-methylcytidine-3'-phosphate
  modified_base 15: mod_base = OTHER; note = 2'-fluorocytidine-3'-phosphate
  modified_base 16: mod_base = OTHER; note = 2'-O-methyladenosine-3'-phosphate
  modified_base 17: mod_base = OTHER; note = 2'-fluorocytidine-3'-phosphorothioate
  modified_base 18: mod_base = OTHER; note = 2'-O-methyladenosine-3'-phosphorothioate
  modified_base 19: mod_base = OTHER; note = 2'-fluorouridine
tggaccgctgtggccacat

SEQ ID NO: 704 - RNA, 19 nt, synthetic construct
  source 1..19: mol_type = other RNA
  modified_base 1: mod_base = OTHER; note = 2'-fluoroguanosine-3'-phosphorothioate
  modified_base 2: mod_base = OTHER; note = 2'-O-methylguanosine-3'-phosphorothioate
  modified_base 3: mod_base = OTHER; note = 2'-fluoroadenosine-3'-phosphate
  modified_base 4: mod_base = OTHER; note = 2'-O-methylcytidine-3'-phosphate
  modified_base 5: mod_base = OTHER; note = 2'-fluorocytidine-3'-phosphate
  modified_base 6: mod_base = OTHER; note = 2'-O-methylguanosine-3'-phosphate
  modified_base 7: mod_base = OTHER; note = 2'-fluorocytidine-3'-phosphate
  modified_base 8: mod_base = OTHER; note = 2'-O-methyluridine-3'-phosphate
  modified_base 9: mod_base = OTHER; note = 2'-fluoroguanosine-3'-phosphate
  modified_base 10: mod_base = OTHER; note = 2'-O-methyluridine-3'-phosphate
  modified_base 11: mod_base = OTHER; note = 2'-fluoroguanosine-3'-phosphate
  modified_base 12: mod_base = OTHER; note = 2'-O-methylguanosine-3'-phosphate
  modified_base 13: mod_base = OTHER; note = 2'-fluorocytidine-3'-phosphate
  modified_base 14: mod_base = OTHER; note = 2'-O-methylcytidine-3'-phosphate
  modified_base 15: mod_base = OTHER; note = 2'-fluoroadenosine-3'-phosphate
  modified_base 16: mod_base = OTHER; note = 2'-O-methylcytidine-3'-phosphate
  modified_base 17: mod_base = OTHER; note = 2'-fluoroadenosine-3'-phosphorothioate
  modified_base 18: mod_base = OTHER; note = 2'-O-methyluridine-3'-phosphorothioate
  modified_base 19: mod_base = OTHER; note = 2'-fluorouridine
ggaccgctgtggccacatt

SEQ ID NO: 705 - RNA, 19 nt, synthetic construct
  source 1..19: mol_type = other RNA
  modified_base 1: mod_base = OTHER; note = 2'-fluorocytidine-3'-phosphorothioate
  modified_base 2: mod_base = OTHER; note = 2'-O-methyladenosine-3'-phosphorothioate
  modified_base 3: mod_base = OTHER; note = 2'-fluorocytidine-3'-phosphate
  modified_base 4: mod_base = OTHER; note = 2'-O-methyladenosine-3'-phosphate
  modified_base 5: mod_base = OTHER; note = 2'-fluorouridine-3'-phosphate
  modified_base 6: mod_base = OTHER; note = 2'-O-methylcytidine-3'-phosphate
  modified_base 7: mod_base = OTHER; note = 2'-fluorocytidine-3'-phosphate
  modified_base 8: mod_base = OTHER; note = 2'-O-methylguanosine-3'-phosphate
  modified_base 9: mod_base = OTHER; note = 2'-fluorocytidine-3'-phosphate
  modified_base 10: mod_base = OTHER; note = 2'-O-methylcytidine-3'-phosphate
  modified_base 11: mod_base = OTHER; note = 2'-fluorouridine-3'-phosphate
  modified_base 12: mod_base = OTHER; note = 2'-O-methylguanosine-3'-phosphate
  modified_base 13: mod_base = OTHER; note = 2'-fluoroguanosine-3'-phosphate
  modified_base 14: mod_base = OTHER; note = 2'-O-methylcytidine-3'-phosphate
  modified_base 15: mod_base = OTHER; note = 2'-fluorocytidine-3'-phosphate
  modified_base 16: mod_base = OTHER; note = 2'-O-methylguanosine-3'-phosphate
  modified_base 17: mod_base = OTHER; note = 2'-fluoroadenosine-3'-phosphorothioate
  modified_base 18: mod_base = OTHER; note = 2'-O-methylcytidine-3'-phosphorothioate
  modified_base 19: mod_base = OTHER; note = 2'-fluorouridine
cacatccgcctggccgact

SEQ ID NO: 706 - RNA, 19 nt, synthetic construct
  source 1..19: mol_type = other RNA
  modified_base 1: mod_base = OTHER; note = 2'-fluoroadenosine-3'-phosphorothioate
  modified_base 2: mod_base = OTHER; note = 2'-O-methylcytidine-3'-phosphorothioate
  modified_base 3: mod_base = OTHER; note = 2'-fluoroadenosine-3'-phosphate
  modified_base 4: mod_base = OTHER; note = 2'-O-methyluridine-3'-phosphate
  modified_base 5: mod_base = OTHER; note = 2'-fluorocytidine-3'-phosphate
  modified_base 6: mod_base = OTHER; note = 2'-O-methylcytidine-3'-phosphate
  modified_base 7: mod_base = OTHER; note = 2'-fluoroguanosine-3'-phosphate
  modified_base 8: mod_base = OTHER; note = 2'-O-methylcytidine-3'-phosphate
  modified_base 9: mod_base = OTHER; note = 2'-fluorocytidine-3'-phosphate
  modified_base 10: mod_base = OTHER; note = 2'-O-methyluridine-3'-phosphate
  modified_base 11: mod_base = OTHER; note = 2'-fluoroguanosine-3'-phosphate
  modified_base 12: mod_base = OTHER; note = 2'-O-methylguanosine-3'-phosphate
  modified_base 13: mod_base = OTHER; note = 2'-fluorocytidine-3'-phosphate
  modified_base 14: mod_base = OTHER; note = 2'-O-methylcytidine-3'-phosphate
  modified_base 15: mod_base = OTHER; note = 2'-fluoroguanosine-3'-phosphate
  modified_base 16: mod_base = OTHER; note = 2'-O-methyladenosine-3'-phosphate
  modified_base 17: mod_base = OTHER; note = 2'-fluorocytidine-3'-phosphorothioate
  modified_base 18: mod_base = OTHER; note = 2'-O-methyluridine-3'-phosphorothioate
  modified_base 19: mod_base = OTHER; note = 2'-fluorouridine
acatccgcctggccgactt

SEQ ID NO: 707 - RNA, 19 nt, synthetic construct
  source 1..19: mol_type = other RNA
  modified_base 1: mod_base = OTHER; note = 2'-fluorocytidine-3'-phosphorothioate
  modified_base 2: mod_base = OTHER; note = 2'-O-methyladenosine-3'-phosphorothioate
  modified_base 3: mod_base = OTHER; note = 2'-fluorouridine-3'-phosphate
  modified_base 4: mod_base = OTHER; note = 2'-O-methylcytidine-3'-phosphate
  modified_base 5: mod_base = OTHER; note = 2'-fluorocytidine-3'-phosphate
  modified_base 6: mod_base = OTHER; note = 2'-O-methylguanosine-3'-phosphate
  modified_base 7: mod_base = OTHER; note = 2'-fluorocytidine-3'-phosphate
  modified_base 8: mod_base = OTHER; note = 2'-O-methylcytidine-3'-phosphate
  modified_base 9: mod_base = OTHER; note = 2'-fluorouridine-3'-phosphate
  modified_base 10: mod_base = OTHER; note = 2'-O-methylguanosine-3'-phosphate
  modified_base 11: mod_base = OTHER; note = 2'-fluoroguanosine-3'-phosphate
  modified_base 12: mod_base = OTHER; note = 2'-O-methylcytidine-3'-phosphate
  modified_base 13: mod_base = OTHER; note = 2'-fluorocytidine-3'-phosphate
  modified_base 14: mod_base = OTHER; note = 2'-O-methylguanosine-3'-phosphate
  modified_base 15: mod_base = OTHER; note = 2'-fluoroadenosine-3'-phosphate
  modified_base 16: mod_base = OTHER; note = 2'-O-methylcytidine-3'-phosphate
  modified_base 17: mod_base = OTHER; note = 2'-fluorouridine-3'-phosphorothioate
  modified_base 18: mod_base = OTHER; note = 2'-O-methyluridine-3'-phosphorothioate
  modified_base 19: mod_base = OTHER; note = 2'-fluorocytidine
catccgcctggccgacttc

SEQ ID NO: 708 - RNA, 19 nt, synthetic construct
  source 1..19: mol_type = other RNA
  modified_base 1: mod_base = OTHER; note = 2'-fluorocytidine-3'-phosphorothioate
  modified_base 2: mod_base = OTHER; note = 2'-O-methyladenosine-3'-phosphorothioate
  modified_base 3: mod_base = OTHER; note = 2'-fluoroguanosine-3'-phosphate
  modified_base 4: mod_base = OTHER; note = 2'-O-methyladenosine-3'-phosphate
  modified_base 5: mod_base = OTHER; note = 2'-fluorouridine-3'-phosphate
  modified_base 6: mod_base = OTHER; note = 2'-O-methylguanosine-3'-phosphate
  modified_base 7: mod_base = OTHER; note = 2'-fluoroguanosine-3'-phosphate
  modified_base 8: mod_base = OTHER; note = 2'-O-methyladenosine-3'-phosphate
  modified_base 9: mod_base = OTHER; note = 2'-fluoroadenosine-3'-phosphate
  modified_base 10: mod_base = OTHER; note = 2'-O-methylcytidine-3'-phosphate
  modified_base 11: mod_base = OTHER; note = 2'-fluoroguanosine-3'-phosphate
  modified_base 12: mod_base = OTHER; note = 2'-O-methylguanosine-3'-phosphate
  modified_base 13: mod_base = OTHER; note = 2'-fluorouridine-3'-phosphate
  modified_base 14: mod_base = OTHER; note = 2'-O-methylguanosine-3'-phosphate
  modified_base 15: mod_base = OTHER; note = 2'-fluorocytidine-3'-phosphate
  modified_base 16: mod_base = OTHER; note = 2'-O-methylguanosine-3'-phosphate
  modified_base 17: mod_base = OTHER; note = 2'-fluoroguanosine-3'-phosphorothioate
  modified_base 18: mod_base = OTHER; note = 2'-O-methyluridine-3'-phosphorothioate
  modified_base 19: mod_base = OTHER; note = 2'-fluorouridine
cagatggaacggtgcggtt

SEQ ID NO: 709 - RNA, 19 nt, synthetic construct
  source 1..19: mol_type = other RNA
  modified_base 1: mod_base = OTHER; note = 2'-fluorocytidine-3'-phosphorothioate
  modified_base 2: mod_base = OTHER; note = 2'-O-methylguanosine-3'-phosphorothioate
  modified_base 3: mod_base = OTHER; note = 2'-fluoroadenosine-3'-phosphate
  modified_base 4: mod_base = OTHER; note = 2'-O-methylguanosine-3'-phosphate
  modified_base 5: mod_base = OTHER; note = 2'-fluoroadenosine-3'-phosphate
  modified_base 6: mod_base = OTHER; note = 2'-O-methyluridine-3'-phosphate
  modified_base 7: mod_base = OTHER; note = 2'-fluorocytidine-3'-phosphate
  modified_base 8: mod_base = OTHER; note = 2'-O-methylcytidine-3'-phosphate
  modified_base 9: mod_base = OTHER; note = 2'-fluorouridine-3'-phosphate
  modified_base 10: mod_base = OTHER; note = 2'-O-methylguanosine-3'-phosphate
  modified_base 11: mod_base = OTHER; note = 2'-fluorocytidine-3'-phosphate
  modified_base 12: mod_base = OTHER; note = 2'-O-methyladenosine-3'-phosphate
  modified_base 13: mod_base = OTHER; note = 2'-fluoroguanosine-3'-phosphate
  modified_base 14: mod_base = OTHER; note = 2'-O-methylguanosine-3'-phosphate
  modified_base 15: mod_base = OTHER; note = 2'-fluorocytidine-3'-phosphate
  modified_base 16: mod_base = OTHER; note = 2'-O-methyluridine-3'-phosphate
  modified_base 17: mod_base = OTHER; note = 2'-fluoroguanosine-3'-phosphorothioate
  modified_base 18: mod_base = OTHER; note = 2'-O-methyluridine-3'-phosphorothioate
  modified_base 19: mod_base = OTHER; note = 2'-fluorouridine
cgagatcctgcaggctgtt

SEQ ID NO: 710 - RNA, 19 nt, synthetic construct
  source 1..19: mol_type = other RNA
  modified_base 1: mod_base = OTHER; note = 2'-fluoroguanosine-3'-phosphorothioate
  modified_base 2: mod_base = OTHER; note = 2'-O-methylguanosine-3'-phosphorothioate
  modified_base 3: mod_base = OTHER; note = 2'-fluorocytidine-3'-phosphate
  modified_base 4: mod_base = OTHER; note = 2'-O-methylcytidine-3'-phosphate
  modified_base 5: mod_base = OTHER; note = 2'-fluorouridine-3'-phosphate
  modified_base 6: mod_base = OTHER; note = 2'-O-methylguanosine-3'-phosphate
  modified_base 7: mod_base = OTHER; note = 2'-fluoroguanosine-3'-phosphate
  modified_base 8: mod_base = OTHER; note = 2'-O-methylguanosine-3'-phosphate
  modified_base 9: mod_base = OTHER; note = 2'-fluoroadenosine-3'-phosphate
  modified_base 10: mod_base = OTHER; note = 2'-O-methylcytidine-3'-phosphate
  modified_base 11: mod_base = OTHER; note = 2'-fluoroadenosine-3'-phosphate
  modified_base 12: mod_base = OTHER; note = 2'-O-methylguanosine-3'-phosphate
  modified_base 13: mod_base = OTHER; note = 2'-fluoroguanosine-3'-phosphate
  modified_base 14: mod_base = OTHER; note = 2'-O-methylcytidine-3'-phosphate
  modified_base 15: mod_base = OTHER; note = 2'-fluoroadenosine-3'-phosphate
  modified_base 16: mod_base = OTHER; note = 2'-O-methylguanosine-3'-phosphate
  modified_base 17: mod_base = OTHER; note = 2'-fluorocytidine-3'-phosphorothioate
  modified_base 18: mod_base = OTHER; note = 2'-O-methyluridine-3'-phosphorothioate
  modified_base 19: mod_base = OTHER; note = 2'-fluoroadenosine
ggcctgggacaggcagcta

SEQ ID NO: 711 - RNA, 19 nt, synthetic construct
  source 1..19: mol_type = other RNA
  modified_base 1: mod_base = OTHER; note = 2'-fluoroguanosine-3'-phosphorothioate
  modified_base 2: mod_base = OTHER; note = 2'-O-methylcytidine-3'-phosphorothioate
  modified_base 3: mod_base = OTHER; note = 2'-fluorocytidine-3'-phosphate
  modified_base 4: mod_base = OTHER; note = 2'-O-methyluridine-3'-phosphate
  modified_base 5: mod_base = OTHER; note = 2'-fluoroguanosine-3'-phosphate
  modified_base 6: mod_base = OTHER; note = 2'-O-methylguanosine-3'-phosphate
  modified_base 7: mod_base = OTHER; note = 2'-fluoroguanosine-3'-phosphate
  modified_base 8: mod_base = OTHER; note = 2'-O-methyladenosine-3'-phosphate
  modified_base 9: mod_base = OTHER; note = 2'-fluorocytidine-3'-phosphate
  modified_base 10: mod_base = OTHER; note = 2'-O-methyladenosine-3'-phosphate
  modified_base 11: mod_base = OTHER; note = 2'-fluoroguanosine-3'-phosphate
  modified_base 12: mod_base = OTHER; note = 2'-O-methylguanosine-3'-phosphate
  modified_base 13: mod_base = OTHER; note = 2'-fluorocytidine-3'-phosphate
  modified_base 14: mod_base = OTHER; note = 2'-O-methyladenosine-3'-phosphate
  modified_base 15: mod_base = OTHER; note = 2'-fluoroguanosine-3'-phosphate
  modified_base 16: mod_base = OTHER; note = 2'-O-methylcytidine-3'-phosphate
  modified_base 17: mod_base = OTHER; note = 2'-fluorouridine-3'-phosphorothioate
  modified_base 18: mod_base = OTHER; note = 2'-O-methyladenosine-3'-phosphorothioate
  modified_base 19: mod_base = OTHER; note = 2'-fluorouridine
gcctgggacaggcagctat

SEQ ID NO: 712 - RNA, 19 nt, synthetic construct
  source 1..19: mol_type = other RNA
  modified_base 1: mod_base = OTHER; note = 2'-fluorouridine-3'-phosphorothioate
  modified_base 2: mod_base = OTHER; note = 2'-O-methyluridine-3'-phosphorothioate
  modified_base 3: mod_base = OTHER; note = 2'-fluorocytidine-3'-phosphate
  modified_base 4: mod_base = OTHER; note = 2'-O-methylguanosine-3'-phosphate
  modified_base 5: mod_base = OTHER; note = 2'-fluorocytidine-3'-phosphate
  modified_base 6: mod_base = OTHER; note = 2'-O-methylcytidine-3'-phosphate
  modified_base 7: mod_base = OTHER; note = 2'-fluorouridine-3'-phosphate
  modified_base 8: mod_base = OTHER; note = 2'-O-methyladenosine-3'-phosphate
  modified_base 9: mod_base = OTHER; note = 2'-fluorouridine-3'-phosphate
  modified_base 10: mod_base = OTHER; note = 2'-O-methylguanosine-3'-phosphate
  modified_base 11: mod_base = OTHER; note = 2'-fluoroadenosine-3'-phosphate
  modified_base 12: mod_base = OTHER; note = 2'-O-methyladenosine-3'-phosphate
  modified_base 13: mod_base = OTHER; note = 2'-fluoroadenosine-3'-phosphate
  modified_base 14: mod_base = OTHER; note = 2'-O-methyluridine-3'-phosphate
  modified_base 15: mod_base = OTHER; note = 2'-fluoroguanosine-3'-phosphate
  modified_base 16: mod_base = OTHER; note = 2'-O-methyluridine-3'-phosphate
  modified_base 17: mod_base = OTHER; note = 2'-fluorouridine-3'-phosphorothioate
  modified_base 18: mod_base = OTHER; note = 2'-O-methylcytidine-3'-phosphorothioate
  modified_base 19: mod_base = OTHER; note = 2'-fluorouridine
ttcgcctatgaaatgttct

SEQ ID NO: 713 - RNA, 19 nt, synthetic construct
  source 1..19: mol_type = other RNA
  modified_base 1: mod_base = OTHER; note = 2'-fluorouridine-3'-phosphorothioate
  modified_base 2: mod_base = OTHER; note = 2'-O-methylcytidine-3'-phosphorothioate
  modified_base 3: mod_base = OTHER; note = 2'-fluoroguanosine-3'-phosphate
  modified_base 4: mod_base = OTHER; note = 2'-O-methylcytidine-3'-phosphate
  modified_base 5: mod_base = OTHER; note = 2'-fluorocytidine-3'-phosphate
  modified_base 6: mod_base = OTHER; note = 2'-O-methyluridine-3'-phosphate
  modified_base 7: mod_base = OTHER; note = 2'-fluoroadenosine-3'-phosphate
  modified_base 8: mod_base = OTHER; note = 2'-O-methyluridine-3'-phosphate
  modified_base 9: mod_base = OTHER; note = 2'-fluoroguanosine-3'-phosphate
  modified_base 10: mod_base = OTHER; note = 2'-O-methyladenosine-3'-phosphate
  modified_base 11: mod_base = OTHER; note = 2'-fluoroadenosine-3'-phosphate
  modified_base 12: mod_base = OTHER; note = 2'-O-methyladenosine-3'-phosphate
  modified_base 13: mod_base = OTHER; note = 2'-fluorouridine-3'-phosphate
  modified_base 14: mod_base = OTHER; note = 2'-O-methylguanosine-3'-phosphate
  modified_base 15: mod_base = OTHER; note = 2'-fluorouridine-3'-phosphate
  modified_base 16: mod_base = OTHER; note = 2'-O-methyluridine-3'-phosphate
  modified_base 17: mod_base = OTHER; note = 2'-fluorocytidine-3'-phosphorothioate
  modified_base 18: mod_base = OTHER; note = 2'-O-methyluridine-3'-phosphorothioate
  modified_base 19: mod_base = OTHER; note = 2'-fluoroadenosine
tcgcctatgaaatgttcta

SEQ ID NO: 714 - RNA, 19 nt, synthetic construct
  source 1..19: mol_type = other RNA
  modified_base 1: mod_base = OTHER; note = 2'-fluoroguanosine-3'-phosphorothioate
  modified_base 2: mod_base = OTHER; note = 2'-O-methylguanosine-3'-phosphorothioate
  modified_base 3: mod_base = OTHER; note = 2'-fluoroguanosine-3'-phosphate
  modified_base 4: mod_base = OTHER; note = 2'-O-methylcytidine-3'-phosphate
  modified_base 5: mod_base = OTHER; note = 2'-fluoroadenosine-3'-phosphate
  modified_base 6: mod_base = OTHER; note = 2'-O-methylguanosine-3'-phosphate
  modified_base 7: mod_base = OTHER; note = 2'-fluoroadenosine-3'-phosphate
  modified_base 8: mod_base = OTHER; note = 2'-O-methylcytidine-3'-phosphate
  modified_base 9: mod_base = OTHER; note = 2'-fluoroguanosine-3'-phosphate
  modified_base 10: mod_base = OTHER; note = 2'-O-methylcytidine-3'-phosphate
  modified_base 11: mod_base = OTHER; note = 2'-fluorocytidine-3'-phosphate
  modified_base 12: mod_base = OTHER; note = 2'-O-methylcytidine-3'-phosphate
  modified_base 13: mod_base = OTHER; note = 2'-fluorouridine-3'-phosphate
  modified_base 14: mod_base = OTHER; note = 2'-O-methyluridine-3'-phosphate
  modified_base 15: mod_base = OTHER; note = 2'-fluorocytidine-3'-phosphate
  modified_base 16: mod_base = OTHER; note = 2'-O-methyluridine-3'-phosphate
  modified_base 17: mod_base = OTHER; note = 2'-fluoroadenosine-3'-phosphorothioate
  modified_base 18: mod_base = OTHER; note = 2'-O-methylcytidine-3'-phosphorothioate
  modified_base 19: mod_base = OTHER; note = 2'-fluorouridine
gggcagacgcccttctact

SEQ ID NO: 715 - RNA, 19 nt, synthetic construct
  source 1..19: mol_type = other RNA
  modified_base 1: mod_base = OTHER; note = 2'-fluoroguanosine-3'-phosphorothioate
  modified_base 2: mod_base = OTHER; note = 2'-O-methyladenosine-3'-phosphorothioate
  modified_base 3: mod_base = OTHER; note = 2'-fluorocytidine-3'-phosphate
  modified_base 4: mod_base = OTHER; note = 2'-O-methylguanosine-3'-phosphate
  modified_base 5: mod_base = OTHER; note = 2'-fluorocytidine-3'-phosphate
  modified_base 6: mod_base = OTHER; note = 2'-O-methylcytidine-3'-phosphate
  modified_base 7: mod_base = OTHER; note = 2'-fluorocytidine-3'-phosphate
  modified_base 8: mod_base = OTHER; note = 2'-O-methyluridine-3'-phosphate
  modified_base 9: mod_base = OTHER; note = 2'-fluorouridine-3'-phosphate
  modified_base 10: mod_base = OTHER; note = 2'-O-methylcytidine-3'-phosphate
  modified_base 11: mod_base = OTHER; note = 2'-fluorouridine-3'-phosphate
  modified_base 12: mod_base = OTHER; note = 2'-O-methyladenosine-3'-phosphate
  modified_base 13: mod_base = OTHER; note = 2'-fluorocytidine-3'-phosphate
  modified_base 14: mod_base = OTHER; note = 2'-O-methylguanosine-3'-phosphate
  modified_base 15: mod_base = OTHER; note = 2'-fluorocytidine-3'-phosphate
  modified_base 16: mod_base = OTHER; note = 2'-O-methylguanosine-3'-phosphate
  modified_base 17: mod_base = OTHER; note = 2'-fluoroguanosine-3'-phosphorothioate
  modified_base 18: mod_base = OTHER; note = 2'-O-methyladenosine-3'-phosphorothioate
  modified_base 19: mod_base = OTHER; note = 2'-fluorouridine
gacgcccttctacgcggat

SEQ ID NO: 716 - RNA, 19 nt, synthetic construct
  source 1..19: mol_type = other RNA
  modified_base 1: mod_base = OTHER; note = 2'-fluoroadenosine-3'-phosphorothioate
  modified_base 2: mod_base = OTHER; note = 2'-O-methylcytidine-3'-phosphorothioate
  modified_base 3: mod_base = OTHER; note = 2'-fluoroguanosine-3'-phosphate
  modified_base 4: mod_base = OTHER; note = 2'-O-methylcytidine-3'-phosphate
  modified_base 5: mod_base = OTHER; note = 2'-fluorocytidine-3'-phosphate
  modified_base 6: mod_base = OTHER; note = 2'-O-methylcytidine-3'-phosphate
  modified_base 7: mod_base = OTHER; note = 2'-fluorouridine-3'-phosphate
  modified_base 8: mod_base = OTHER; note = 2'-O-methyluridine-3'-phosphate
  modified_base 9: mod_base = OTHER; note = 2'-fluorocytidine-3'-phosphate
  modified_base 10: mod_base = OTHER; note = 2'-O-methyluridine-3'-phosphate
  modified_base 11: mod_base = OTHER; note = 2'-fluoroadenosine-3'-phosphate
  modified_base 12: mod_base = OTHER; note = 2'-O-methylcytidine-3'-phosphate
  modified_base 13: mod_base = OTHER; note = 2'-fluoroguanosine-3'-phosphate
  modified_base 14: mod_base = OTHER; note = 2'-O-methylcytidine-3'-phosphate
  modified_base 15: mod_base = OTHER; note = 2'-fluoroguanosine-3'-phosphate
  modified_base 16: mod_base = OTHER; note = 2'-O-methylguanosine-3'-phosphate
  modified_base 17: mod_base = OTHER; note = 2'-fluoroadenosine-3'-phosphorothioate
  modified_base 18: mod_base = OTHER; note = 2'-O-methyluridine-3'-phosphorothioate
  modified_base 19: mod_base = OTHER; note = 2'-fluorouridine
acgcccttctacgcggatt

SEQ ID NO: 717 - RNA, 19 nt, synthetic construct
  source 1..19: mol_type = other RNA
  modified_base 1: mod_base = OTHER; note = 2'-fluorocytidine-3'-phosphorothioate
  modified_base 2: mod_base = OTHER; note = 2'-O-methylguanosine-3'-phosphorothioate
  modified_base 3: mod_base = OTHER; note = 2'-fluorocytidine-3'-phosphate
  modified_base 4: mod_base = OTHER; note = 2'-O-methylcytidine-3'-phosphate
  modified_base 5: mod_base = OTHER; note = 2'-fluorocytidine-3'-phosphate
  modified_base 6: mod_base = OTHER; note = 2'-O-methyluridine-3'-phosphate
  modified_base 7: mod_base = OTHER; note = 2'-fluorouridine-3'-phosphate
  modified_base 8: mod_base = OTHER; note = 2'-O-methylcytidine-3'-phosphate
  modified_base 9: mod_base = OTHER; note = 2'-fluorouridine-3'-phosphate
  modified_base 10: mod_base = OTHER; note = 2'-O-methyladenosine-3'-phosphate
  modified_base 11: mod_base = OTHER; note = 2'-fluorocytidine-3'-phosphate
  modified_base 12: mod_base = OTHER; note = 2'-O-methylguanosine-3'-phosphate
  modified_base 13: mod_base = OTHER; note = 2'-fluorocytidine-3'-phosphate
  modified_base 14: mod_base = OTHER; note = 2'-O-methylguanosine-3'-phosphate
  modified_base 15: mod_base = OTHER; note = 2'-fluoroguanosine-3'-phosphate
  modified_base 16: mod_base = OTHER; note = 2'-O-methyladenosine-3'-phosphate
  modified_base 17: mod_base = OTHER; note = 2'-fluorouridine-3'-phosphorothioate
  modified_base 18: mod_base = OTHER; note = 2'-O-methyluridine-3'-phosphorothioate
  modified_base 19: mod_base = OTHER; note = 2'-fluorouridine
cgcccttctacgcggattt

SEQ ID NO: 718 - RNA, 19 nt, synthetic construct
  source 1..19: mol_type = other RNA
  modified_base 1: mod_base = OTHER; note = 2'-fluoroguanosine-3'-phosphorothioate
  modified_base 2: mod_base = OTHER; note = 2'-O-methylcytidine-3'-phosphorothioate
  modified_base 3: mod_base = OTHER; note = 2'-fluorocytidine-3'-phosphate
  modified_base 4: mod_base = OTHER; note = 2'-O-methylcytidine-3'-phosphate
  modified_base 5: mod_base = OTHER; note = 2'-fluorouridine-3'-phosphate
  modified_base 6: mod_base = OTHER; note = 2'-O-methyluridine-3'-phosphate
  modified_base 7: mod_base = OTHER; note = 2'-fluorocytidine-3'-phosphate
  modified_base 8: mod_base = OTHER; note = 2'-O-methyluridine-3'-phosphate
  modified_base 9: mod_base = OTHER; note = 2'-fluoroadenosine-3'-phosphate
  modified_base 10: mod_base = OTHER; note = 2'-O-methylcytidine-3'-phosphate
  modified_base 11: mod_base = OTHER; note = 2'-fluoroguanosine-3'-phosphate
  modified_base 12: mod_base = OTHER; note = 2'-O-methylcytidine-3'-phosphate
  modified_base 13: mod_base = OTHER; note = 2'-fluoroguanosine-3'-phosphate
  modified_base 14: mod_base = OTHER; note = 2'-O-methylguanosine-3'-phosphate
  modified_base 15: mod_base = OTHER; note = 2'-fluoroadenosine-3'-phosphate
  modified_base 16: mod_base = OTHER; note = 2'-O-methyluridine-3'-phosphate
  modified_base 17: mod_base = OTHER; note = 2'-fluorouridine-3'-phosphorothioate
  modified_base 18: mod_base = OTHER; note = 2'-O-methylcytidine-3'-phosphorothioate
  modified_base 19: mod_base = OTHER; note = 2'-fluorouridine
gcccttctacgcggattct

SEQ ID NO: 719 - RNA, 19 nt, synthetic construct
  source 1..19: mol_type = other RNA
  modified_base 1: mod_base = OTHER; note = 2'-fluorocytidine-3'-phosphorothioate
  modified_base 2: mod_base = OTHER; note = 2'-O-methylcytidine-3'-phosphorothioate
  modified_base 3: mod_base = OTHER; note = 2'-fluorouridine-3'-phosphate
  modified_base 4: mod_base = OTHER; note = 2'-O-methyluridine-3'-phosphate
  modified_base 5: mod_base = OTHER; note = 2'-fluorocytidine-3'-phosphate
  modified_base 6: mod_base = OTHER; note = 2'-O-methyluridine-3'-phosphate
  modified_base 7: mod_base = OTHER; note = 2'-fluoroadenosine-3'-phosphate
  modified_base 8: mod_base = OTHER; note = 2'-O-methylcytidine-3'-phosphate
  modified_base 9: mod_base = OTHER; note = 2'-fluoroguanosine-3'-phosphate
  modified_base 10: mod_base = OTHER; note = 2'-O-methylcytidine-3'-phosphate
  modified_base 11: mod_base = OTHER; note = 2'-fluoroguanosine-3'-phosphate
  modified_base 12: mod_base = OTHER; note = 2'-O-methylguanosine-3'-phosphate
  modified_base 13: mod_base = OTHER; note = 2'-fluoroadenosine-3'-phosphate
  modified_base 14: mod_base = OTHER; note = 2'-O-methyluridine-3'-phosphate
  modified_base 15: mod_base = OTHER; note = 2'-fluorouridine-3'-phosphate
  modified_base 16: mod_base = OTHER; note = 2'-O-methylcytidine-3'-phosphate
  modified_base 17: mod_base = OTHER; note = 2'-fluorocytidine-3'-phosphorothioate
  modified_base 18: mod_base = OTHER; note = 2'-O-methyladenosine-3'-phosphorothioate
  modified_base 19: mod_base = OTHER; note = 2'-fluorouridine
ccttctacgcggattccat

SEQ ID NO: 720 - RNA, 19 nt, synthetic construct
  source 1..19: mol_type = other RNA
  modified_base 1: mod_base = OTHER; note = 2'-fluorocytidine-3'-phosphorothioate
  modified_base 2: mod_base = OTHER; note = 2'-O-methylguanosine-3'-phosphorothioate
  modified_base 3: mod_base = OTHER; note = 2'-fluoroguanosine-3'-phosphate
  modified_base 4: mod_base = OTHER; note = 2'-O-methyladenosine-3'-phosphate
  modified_base 5: mod_base = OTHER; note = 2'-fluorouridine-3'-phosphate
  modified_base 6: mod_base = OTHER; note = 2'-O-methyluridine-3'-phosphate
  modified_base 7: mod_base = OTHER; note = 2'-fluorocytidine-3'-phosphate
  modified_base 8: mod_base = OTHER; note = 2'-O-methylcytidine-3'-phosphate
  modified_base 9: mod_base = OTHER; note = 2'-fluoroadenosine-3'-phosphate
  modified_base 10: mod_base = OTHER; note = 2'-O-methylcytidine-3'-phosphate
  modified_base 11: mod_base = OTHER; note = 2'-fluoroguanosine-3'-phosphate
  modified_base 12: mod_base = OTHER; note = 2'-O-methylguanosine-3'-phosphate
  modified_base 13: mod_base = OTHER; note = 2'-fluorocytidine-3'-phosphate
  modified_base 14: mod_base = OTHER; note = 2'-O-methylguanosine-3'-phosphate
  modified_base 15: mod_base = OTHER; note = 2'-fluoroguanosine-3'-phosphate
  modified_base 16: mod_base = OTHER; note = 2'-O-methyladenosine-3'-phosphate
  modified_base 17: mod_base = OTHER; note = 2'-fluoroguanosine-3'-phosphorothioate
  modified_base 18: mod_base = OTHER; note = 2'-O-methyladenosine-3'-phosphorothioate
  modified_base 19: mod_base = OTHER; note = 2'-fluorouridine
cggattccacggcggagat

SEQ ID NO: 721 - RNA, 19 nt, synthetic construct
  source 1..19: mol_type = other RNA
  modified_base 1: mod_base = OTHER; note = 2'-fluoroadenosine-3'-phosphorothioate
  modified_base 2: mod_base = OTHER; note = 2'-O-methyluridine-3'-phosphorothioate
  modified_base 3: mod_base = OTHER; note = 2'-fluorouridine-3'-phosphate
  modified_base 4: mod_base = OTHER; note = 2'-O-methylcytidine-3'-phosphate
  modified_base 5: mod_base = OTHER; note = 2'-fluorocytidine-3'-phosphate
  modified_base 6: mod_base = OTHER; note = 2'-O-methyladenosine-3'-phosphate
  modified_base 7: mod_base = OTHER; note = 2'-fluorocytidine-3'-phosphate
  modified_base 8: mod_base = OTHER; note = 2'-O-methylguanosine-3'-phosphate
  modified_base 9: mod_base = OTHER; note = 2'-fluoroguanosine-3'-phosphate
  modified_base 10: mod_base = OTHER; note = 2'-O-methylcytidine-3'-phosphate
  modified_base 11: mod_base = OTHER; note = 2'-fluoroguanosine-3'-phosphate
  modified_base 12: mod_base = OTHER; note = 2'-O-methylguanosine-3'-phosphate
  modified_base 13: mod_base = OTHER; note = 2'-fluoroadenosine-3'-phosphate
  modified_base 14: mod_base = OTHER; note = 2'-O-methylguanosine-3'-phosphate
  modified_base 15: mod_base = OTHER; note = 2'-fluoroadenosine-3'-phosphate
  modified_base 16: mod_base = OTHER; note = 2'-O-methylcytidine-3'-phosphate
  modified_base 17: mod_base = OTHER; note = 2'-fluorocytidine-3'-phosphorothioate
  modified_base 18: mod_base = OTHER; note = 2'-O-methyluridine-3'-phosphorothioate
  modified_base 19: mod_base = OTHER; note = 2'-fluoroadenosine
attccacggcggagaccta

SEQ ID NO: 722 - RNA, 19 nt, synthetic construct
  source 1..19: mol_type = other RNA
  modified_base 1: mod_base = OTHER; note = 2'-fluoroguanosine-3'-phosphorothioate
  modified_base 2: mod_base = OTHER; note = 2'-O-methylguanosine-3'-phosphorothioate
  modified_base 3: mod_base = OTHER; note = 2'-fluorocytidine-3'-phosphate
  modified_base 4: mod_base = OTHER; note = 2'-O-methyladenosine-3'-phosphate
  modified_base 5: mod_base = OTHER; note = 2'-fluoroadenosine-3'-phosphate
  modified_base 6: mod_base = OTHER; note = 2'-O-methylguanosine-3'-phosphate
  modified_base 7: mod_base = OTHER; note = 2'-fluoroadenosine-3'-phosphate
  modified_base 8: mod_base = OTHER; note = 2'-O-methyluridine-3'-phosphate
  modified_base 9: mod_base = OTHER; note = 2'-fluorocytidine-3'-phosphate
  modified_base 10: mod_base = OTHER; note = 2'-O-methylguanosine-3'-phosphate
  modified_base 11: mod_base = OTHER; note = 2'-fluorouridine-3'-phosphate
  modified_base 12: mod_base = OTHER; note = 2'-O-methylcytidine-3'-phosphate
  modified_base 13: mod_base = OTHER; note = 2'-fluorocytidine-3'-phosphate
  modified_base 14: mod_base = OTHER; note = 2'-O-methyladenosine-3'-phosphate
  modified_base 15: mod_base = OTHER; note = 2'-fluorocytidine-3'-phosphate
  modified_base 16: mod_base = OTHER; note = 2'-O-methyluridine-3'-phosphate
  modified_base 17: mod_base = OTHER; note = 2'-fluoroadenosine-3'-phosphorothioate
  modified_base 18: mod_base = OTHER; note = 2'-O-methylcytidine-3'-phosphorothioate
  modified_base 19: mod_base = OTHER; note = 2'-fluoroadenosine
ggcaagatcgtccactaca

SEQ ID NO: 723 - RNA, 19 nt, synthetic construct
  source 1..19: mol_type = other RNA
  modified_base 1: mod_base = OTHER; note = 2'-fluoroguanosine-3'-phosphorothioate
  modified_base 2: mod_base = OTHER; note = 2'-O-methylcytidine-3'-phosphorothioate
  modified_base 3: mod_base = OTHER; note = 2'-fluoroadenosine-3'-phosphate
  modified_base 4: mod_base = OTHER; note = 2'-O-methyladenosine-3'-phosphate
  modified_base 5: mod_base = OTHER; note = 2'-fluoroguanosine-3'-phosphate
  modified_base 6: mod_base = OTHER; note = 2'-O-methyladenosine-3'-phosphate
  modified_base 7: mod_base = OTHER; note = 2'-fluorouridine-3'-phosphate
  modified_base 8: mod_base = OTHER; note = 2'-O-methylcytidine-3'-phosphate
  modified_base 9: mod_base = OTHER; note = 2'-fluoroguanosine-3'-phosphate
  modified_base 10: mod_base = OTHER; note = 2'-O-methyluridine-3'-phosphate
  modified_base 11: mod_base = OTHER; note = 2'-fluorocytidine-3'-phosphate
  modified_base 12: mod_base = OTHER; note = 2'-O-methylcytidine-3'-phosphate
  modified_base 13: mod_base = OTHER; note = 2'-fluoroadenosine-3'-phosphate
  modified_base 14: mod_base = OTHER; note = 2'-O-methylcytidine-3'-phosphate
  modified_base 15: mod_base = OTHER; note = 2'-fluorouridine-3'-phosphate
  modified_base 16: mod_base = OTHER; note = 2'-O-methyladenosine-3'-phosphate
  modified_base 17: mod_base = OTHER; note = 2'-fluorocytidine-3'-phosphorothioate
  modified_base 18: mod_base = OTHER; note = 2'-O-methyladenosine-3'-phosphorothioate
  modified_base 19: mod_base = OTHER; note = 2'-fluoroadenosine
gcaagatcgtccactacaa

SEQ ID NO: 724 - RNA, 19 nt, synthetic construct
  source 1..19: mol_type = other RNA
  modified_base 1: mod_base = OTHER; note = 2'-fluorocytidine-3'-phosphorothioate
  modified_base 2: mod_base = OTHER; note = 2'-O-methyladenosine-3'-phosphorothioate
  modified_base 3: mod_base = OTHER; note = 2'-fluoroadenosine-3'-phosphate
  modified_base 4: mod_base = OTHER; note = 2'-O-methylguanosine-3'-phosphate
  modified_base 5: mod_base = OTHER; note = 2'-fluoroadenosine-3'-phosphate
  modified_base 6: mod_base = OTHER; note = 2'-O-methyluridine-3'-phosphate
  modified_base 7: mod_base = OTHER; note = 2'-fluorocytidine-3'-phosphate
  modified_base 8: mod_base = OTHER; note = 2'-O-methylguanosine-3'-phosphate
  modified_base 9: mod_base = OTHER; note = 2'-fluorouridine-3'-phosphate
  modified_base 10: mod_base = OTHER; note = 2'-O-methylcytidine-3'-phosphate
  modified_base 11: mod_base = OTHER; note = 2'-fluorocytidine-3'-phosphate
  modified_base 12: mod_base = OTHER; note = 2'-O-methyladenosine-3'-phosphate
  modified_base 13: mod_base = OTHER; note = 2'-fluorocytidine-3'-phosphate
  modified_base 14: mod_base = OTHER; note = 2'-O-methyluridine-3'-phosphate
  modified_base 15: mod_base = OTHER; note = 2'-fluoroadenosine-3'-phosphate
  modified_base 16: mod_base = OTHER; note = 2'-O-methylcytidine-3'-phosphate
  modified_base 17: mod_base = OTHER; note = 2'-fluoroadenosine-3'-phosphorothioate
  modified_base 18: mod_base = OTHER; note = 2'-O-methyladenosine-3'-phosphorothioate
  modified_base 19: mod_base = OTHER; note = 2'-fluoroguanosine
caagatcgtccactacaag

SEQ ID NO: 725 - RNA, 19 nt, synthetic construct
  source 1..19: mol_type = other RNA
  modified_base 1: mod_base = OTHER; note = 2'-fluoroguanosine-3'-phosphorothioate
  modified_base 2: mod_base = OTHER; note = 2'-O-methyladenosine-3'-phosphorothioate
  modified_base 3: mod_base = OTHER; note = 2'-fluorouridine-3'-phosphate
  modified_base 4: mod_base = OTHER; note = 2'-O-methylcytidine-3'-phosphate
  modified_base 5: mod_base = OTHER; note = 2'-fluoroguanosine-3'-phosphate
  modified_base 6: mod_base = OTHER; note = 2'-O-methyluridine-3'-phosphate
  modified_base 7: mod_base = OTHER; note = 2'-fluorocytidine-3'-phosphate
  modified_base 8: mod_base = OTHER; note = 2'-O-methylcytidine-3'-phosphate
  modified_base 9: mod_base = OTHER; note = 2'-fluoroadenosine-3'-phosphate
  modified_base 10: mod_base = OTHER; note = 2'-O-methylcytidine-3'-phosphate
  modified_base 11: mod_base = OTHER; note = 2'-fluorouridine-3'-phosphate
  modified_base 12: mod_base = OTHER; note = 2'-O-methyladenosine-3'-phosphate
  modified_base 13: mod_base = OTHER; note = 2'-fluorocytidine-3'-phosphate
  modified_base 14: mod_base = OTHER; note = 2'-O-methyladenosine-3'-phosphate
  modified_base 15: mod_base = OTHER; note = 2'-fluoroadenosine-3'-phosphate
  modified_base 16: mod_base = OTHER; note = 2'-O-methylguanosine-3'-phosphate
  modified_base 17: mod_base = OTHER; note = 2'-fluoroguanosine-3'-phosphorothioate
  modified_base 18: mod_base = OTHER; note = 2'-O-methyladenosine-3'-phosphorothioate
  modified_base 19: mod_base = OTHER; note = 2'-fluorouridine
gatcgtccactacaaggat

SEQ ID NO: 726 - RNA, 19 nt, synthetic construct
  source 1..19: mol_type = other RNA
  modified_base 1: mod_base = OTHER; note = 2'-fluorocytidine-3'-phosphorothioate
  modified_base 2: mod_base = OTHER; note = 2'-O-methylguanosine-3'-phosphorothioate
  modified_base 3: mod_base = OTHER; note = 2'-fluorouridine-3'-phosphate
  modified_base 4: mod_base = OTHER; note = 2'-O-methylcytidine-3'-phosphate
  modified_base 5: mod_base = OTHER; note = 2'-fluorocytidine-3'-phosphate
  modified_base 6: mod_base = OTHER; note = 2'-O-methyladenosine-3'-phosphate
  modified_base 7: mod_base = OTHER; note = 2'-fluorocytidine-3'-phosphate
  modified_base 8: mod_base = OTHER; note = 2'-O-methyluridine-3'-phosphate
  modified_base 9: mod_base = OTHER; note = 2'-fluoroadenosine-3'-phosphate
  modified_base 10: mod_base = OTHER; note = 2'-O-methylcytidine-3'-phosphate
  modified_base 11: mod_base = OTHER; note = 2'-fluoroadenosine-3'-phosphate
  modified_base 12: mod_base = OTHER; note = 2'-O-methyladenosine-3'-phosphate
  modified_base 13: mod_base = OTHER; note = 2'-fluoroguanosine-3'-phosphate
  modified_base 14: mod_base = OTHER; note = 2'-O-methylguanosine-3'-phosphate
  modified_base 15: mod_base = OTHER; note = 2'-fluoroadenosine-3'-phosphate
  modified_base 16: mod_base = OTHER; note = 2'-O-methylguanosine-3'-phosphate
  modified_base 17: mod_base = OTHER; note = 2'-fluorocytidine-3'-phosphorothioate
  modified_base 18: mod_base = OTHER; note = 2'-O-methyladenosine-3'-phosphorothioate
  modified_base 19: mod_base = OTHER; note = 2'-fluorouridine
cgtccactacaaggagcat

SEQ ID NO: 727 - RNA, 19 nt, synthetic construct
  source 1..19: mol_type = other RNA
  modified_base 1: mod_base = OTHER; note = 2'-fluorocytidine-3'-phosphorothioate
  modified_base 2: mod_base = OTHER; note = 2'-O-methylcytidine-3'-phosphorothioate
  modified_base 3: mod_base = OTHER; note = 2'-fluoroadenosine-3'-phosphate
  modified_base 4: mod_base = OTHER; note = 2'-O-methylcytidine-3'-phosphate
  modified_base 5: mod_base = OTHER; note = 2'-fluorouridine-3'-phosphate
  modified_base 6: mod_base = OTHER; note = 2'-O-methyladenosine-3'-phosphate
  modified_base 7: mod_base = OTHER; note = 2'-fluorocytidine-3'-phosphate
  modified_base 8: mod_base = OTHER; note = 2'-O-methyladenosine-3'-phosphate
  modified_base 9: mod_base = OTHER; note = 2'-fluoroadenosine-3'-phosphate
  modified_base 10: mod_base = OTHER; note = 2'-O-methylguanosine-3'-phosphate
  modified_base 11: mod_base = OTHER; note = 2'-fluoroguanosine-3'-phosphate
  modified_base 12: mod_base = OTHER; note = 2'-O-methyladenosine-3'-phosphate
  modified_base 13: mod_base = OTHER; note = 2'-fluoroguanosine-3'-phosphate
  modified_base 14: mod_base = OTHER; note = 2'-O-methylcytidine-3'-phosphate
  modified_base 15: mod_base = OTHER; note = 2'-fluoroadenosine-3'-phosphate
  modified_base 16: mod_base = OTHER; note = 2'-O-methylcytidine-3'-phosphate
  modified_base 17: mod_base = OTHER; note = 2'-fluorocytidine-3'-phosphorothioate
  modified_base 18: mod_base = OTHER; note = 2'-O-methyluridine-3'-phosphorothioate
  modified_base 19: mod_base = OTHER; note = 2'-fluorouridine
ccactacaaggagcacctt

SEQ ID NO: 728 - RNA, 19 nt, synthetic construct
  source 1..19: mol_type = other RNA
  modified_base 1: mod_base = OTHER; note = 2'-fluorocytidine-3'-phosphorothioate
  modified_base 2: mod_base = OTHER; note = 2'-O-methyluridine-3'-phosphorothioate
  modified_base 3: mod_base = OTHER; note = 2'-fluoroadenosine-3'-phosphate
  modified_base 4: mod_base = OTHER; note = 2'-O-methylcytidine-3'-phosphate
  modified_base 5: mod_base = OTHER; note = 2'-fluoroadenosine-3'-phosphate
  modified_base 6: mod_base = OTHER; note = 2'-O-methyladenosine-3'-phosphate
  modified_base 7: mod_base = OTHER; note = 2'-fluoroguanosine-3'-phosphate
  modified_base 8: mod_base = OTHER; note = 2'-O-methylguanosine-3'-phosphate
  modified_base 9: mod_base = OTHER; note = 2'-fluoroadenosine-3'-phosphate
  modified_base 10: mod_base = OTHER; note = 2'-O-methylguanosine-3'-phosphate
  modified_base 11: mod_base = OTHER; note = 2'-fluorocytidine-3'-phosphate
  modified_base 12: mod_base = OTHER; note = 2'-O-methyladenosine-3'-phosphate
  modified_base 13: mod_base = OTHER; note = 2'-fluorocytidine-3'-phosphate
  modified_base 14: mod_base = OTHER; note = 2'-O-methylcytidine-3'-phosphate
  modified_base 15: mod_base = OTHER; note = 2'-fluorouridine-3'-phosphate
  modified_base 16: mod_base = OTHER; note = 2'-O-methylcytidine-3'-phosphate
  modified_base 17: mod_base = OTHER; note = 2'-fluorouridine-3'-phosphorothioate
  modified_base 18: mod_base = OTHER; note = 2'-O-methylcytidine-3'-phosphorothioate
  modified_base 19: mod_base = OTHER; note = 2'-fluorouridine
ctacaaggagcacctctct

SEQ ID NO: 729 - RNA, 19 nt, synthetic construct
  source 1..19: mol_type = other RNA
  modified_base 1: mod_base = OTHER; note = 2'-fluorouridine-3'-phosphorothioate
  modified_base 2: mod_base = OTHER; note = 2'-O-methyladenosine-3'-phosphorothioate
  modified_base 3: mod_base = OTHER; note = 2'-fluorocytidine-3'-phosphate
  modified_base 4: mod_base = OTHER; note = 2'-O-methyladenosine-3'-phosphate
  modified_base 5: mod_base = OTHER; note = 2'-fluoroadenosine-3'-phosphate
  modified_base 6: mod_base = OTHER; note = 2'-O-methylguanosine-3'-phosphate
  modified_base 7: mod_base = OTHER; note = 2'-fluoroguanosine-3'-phosphate
  modified_base 8: mod_base = OTHER; note = 2'-O-methyladenosine-3'-phosphate
  modified_base 9: mod_base = OTHER; note = 2'-fluoroguanosine-3'-phosphate
  modified_base 10: mod_base = OTHER; note = 2'-O-methylcytidine-3'-phosphate
  modified_base 11: mod_base = OTHER; note = 2'-fluoroadenosine-3'-phosphate
  modified_base 12: mod_base = OTHER; note = 2'-O-methylcytidine-3'-phosphate
  modified_base 13: mod_base = OTHER; note = 2'-fluorocytidine-3'-phosphate
  modified_base 14: mod_base = OTHER; note = 2'-O-methyluridine-3'-phosphate
  modified_base 15: mod_base = OTHER; note = 2'-fluorocytidine-3'-phosphate
  modified_base 16: mod_base = OTHER; note = 2'-O-methyluridine-3'-phosphate
  modified_base 17: mod_base = OTHER; note = 2'-fluorocytidine-3'-phosphorothioate
  modified_base 18: mod_base = OTHER; note = 2'-O-methyluridine-3'-phosphorothioate
  modified_base 19: mod_base = OTHER; note = 2'-fluorouridine
tacaaggagcacctctctt

SEQ ID NO: 730 - RNA, 19 nt, synthetic construct
  source 1..19: mol_type = other RNA
  modified_base 1: mod_base = OTHER; note = 2'-fluorocytidine-3'-phosphorothioate
  modified_base 2: mod_base = OTHER; note = 2'-O-methyladenosine-3'-phosphorothioate
  modified_base 3: mod_base = OTHER; note = 2'-fluoroadenosine-3'-phosphate
  modified_base 4: mod_base = OTHER; note = 2'-O-methylguanosine-3'-phosphate
  modified_base 5: mod_base = OTHER; note = 2'-fluoroguanosine-3'-phosphate
  modified_base 6: mod_base = OTHER; note = 2'-O-methyladenosine-3'-phosphate
  modified_base 7: mod_base = OTHER; note = 2'-fluoroguanosine-3'-phosphate
  modified_base 8: mod_base = OTHER; note = 2'-O-methylcytidine-3'-phosphate
  modified_base 9: mod_base = OTHER; note = 2'-fluoroadenosine-3'-phosphate
  modified_base 10: mod_base = OTHER; note = 2'-O-methylcytidine-3'-phosphate
  modified_base 11: mod_base = OTHER; note = 2'-fluorocytidine-3'-phosphate
  modified_base 12: mod_base = OTHER; note = 2'-O-methyluridine-3'-phosphate
  modified_base 13: mod_base = OTHER; note = 2'-fluorocytidine-3'-phosphate
  modified_base 14: mod_base = OTHER; note = 2'-O-methyluridine-3'-phosphate
  modified_base 15: mod_base = OTHER; note = 2'-fluorocytidine-3'-phosphate
  modified_base 16: mod_base = OTHER; note = 2'-O-methyluridine-3'-phosphate
  modified_base 17: mod_base = OTHER; note = 2'-fluorocytidine-3'-phosphorothioate
  modified_base 18: mod_base = OTHER; note = 2'-O-methyluridine-3'-phosphorothioate
  modified_base 19: mod_base = OTHER; note = 2'-fluorouridine
caaggagcacctctctctt

SEQ ID NO: 731 - RNA, 19 nt, synthetic construct
  source 1..19: mol_type = other RNA
  modified_base 1: mod_base = OTHER; note = 2'-fluorocytidine-3'-phosphorothioate
  modified_base 2: mod_base = OTHER; note = 2'-O-methyluridine-3'-phosphorothioate
  modified_base 3: mod_base = OTHER; note = 2'-fluorouridine-3'-phosphate
  modified_base 4: mod_base = OTHER; note = 2'-O-methylcytidine-3'-phosphate
  modified_base 5: mod_base = OTHER; note = 2'-fluorocytidine-3'-phosphate
  modified_base 6: mod_base = OTHER; note = 2'-O-methylguanosine-3'-phosphate
  modified_base 7: mod_base = OTHER; note = 2'-fluoroguanosine-3'-phosphate
  modified_base 8: mod_base = OTHER; note = 2'-O-methyladenosine-3'-phosphate
  modified_base 9: mod_base = OTHER; note = 2'-fluorocytidine-3'-phosphate
  modified_base 10: mod_base = OTHER; note = 2'-O-methyladenosine-3'-phosphate
  modified_base 11: mod_base = OTHER; note = 2'-fluorocytidine-3'-phosphate
  modified_base 12: mod_base = OTHER; note = 2'-O-methyladenosine-3'-phosphate
  modified_base 13: mod_base = OTHER; note = 2'-fluorouridine-3'-phosphate
  modified_base 14: mod_base = OTHER; note = 2'-O-methylcytidine-3'-phosphate
  modified_base 15: mod_base = OTHER; note = 2'-fluorocytidine-3'-phosphate
  modified_base 16: mod_base = OTHER; note = 2'-O-methylcytidine-3'-phosphate
  modified_base 17: mod_base = OTHER; note = 2'-fluorouridine-3'-phosphorothioate
  modified_base 18: mod_base = OTHER; note = 2'-O-methyluridine-3'-phosphorothioate
  modified_base 19: mod_base = OTHER; note = 2'-fluoroadenosine
cttccggacacatccctta

SEQ ID NO: 732 - RNA, 19 nt, synthetic construct
  source 1..19: mol_type = other RNA
  modified_base 1: mod_base = OTHER; note = 2'-fluorouridine-3'-phosphorothioate
  modified_base 2: mod_base = OTHER; note = 2'-O-methylcytidine-3'-phosphorothioate
  modified_base 3: mod_base = OTHER; note = 2'-fluorocytidine-3'-phosphate
  modified_base 4: mod_base = OTHER; note = 2'-O-methylguanosine-3'-phosphate
  modified_base 5: mod_base = OTHER; note = 2'-fluoroguanosine-3'-phosphate
  modified_base 6: mod_base = OTHER; note = 2'-O-methyladenosine-3'-phosphate
  modified_base 7: mod_base = OTHER; note = 2'-fluorocytidine-3'-phosphate
  modified_base 8: mod_base = OTHER; note = 2'-O-methyladenosine-3'-phosphate
  modified_base 9: mod_base = OTHER; note = 2'-fluorocytidine-3'-phosphate
  modified_base 10: mod_base = OTHER; note = 2'-O-methyladenosine-3'-phosphate
  modified_base 11: mod_base = OTHER; note = 2'-fluorouridine-3'-phosphate
  modified_base 12: mod_base = OTHER; note = 2'-O-methylcytidine-3'-phosphate
  modified_base 13: mod_base = OTHER; note = 2'-fluorocytidine-3'-phosphate
  modified_base 14: mod_base = OTHER; note = 2'-O-methylcytidine-3'-phosphate
  modified_base 15: mod_base = OTHER; note = 2'-fluorouridine-3'-phosphate
  modified_base 16: mod_base = OTHER; note = 2'-O-methyluridine-3'-phosphate
  modified_base 17: mod_base = OTHER; note = 2'-fluorocytidine-3'-phosphorothioate
  modified_base 18: mod_base = OTHER; note = 2'-O-methyluridine-3'-phosphorothioate
  modified_base 19: mod_base = OTHER; note = 2'-fluorouridine
tccggacacatcccttctt

SEQ ID NO: 733 - RNA, 19 nt, synthetic construct
  source 1..19: mol_type = other RNA
  modified_base 1: mod_base = OTHER; note = 2'-fluorocytidine-3'-phosphorothioate
  modified_base 2: mod_base = OTHER; note = 2'-O-methylcytidine-3'-phosphorothioate
  modified_base 3: mod_base = OTHER; note = 2'-fluoroguanosine-3'-phosphate
  modified_base 4: mod_base = OTHER; note = 2'-O-methylguanosine-3'-phosphate
  modified_base 5: mod_base = OTHER; note = 2'-fluoroadenosine-3'-phosphate
  modified_base 6: mod_base = OTHER; note = 2'-O-methylcytidine-3'-phosphate
  modified_base 7: mod_base = OTHER; note = 2'-fluoroadenosine-3'-phosphate
  modified_base 8: mod_base = OTHER; note = 2'-O-methylcytidine-3'-phosphate
  modified_base 9: mod_base = OTHER; note = 2'-fluoroadenosine-3'-phosphate
  modified_base 10: mod_base = OTHER; note = 2'-O-methyluridine-3'-phosphate
  modified_base 11: mod_base = OTHER; note = 2'-fluorocytidine-3'-phosphate
  modified_base 12: mod_base = OTHER; note = 2'-O-methylcytidine-3'-phosphate
  modified_base 13: mod_base = OTHER; note = 2'-fluorocytidine-3'-phosphate
  modified_base 14: mod_base = OTHER; note = 2'-O-methyluridine-3'-phosphate
  modified_base 15: mod_base = OTHER; note = 2'-fluorouridine-3'-phosphate
  modified_base 16: mod_base = OTHER; note = 2'-O-methylcytidine-3'-phosphate
  modified_base 17: mod_base = OTHER; note = 2'-fluorouridine-3'-phosphorothioate
  modified_base 18: mod_base = OTHER; note = 2'-O-methyluridine-3'-phosphorothioate
  modified_base 19: mod_base = OTHER; note = 2'-fluoroadenosine
ccggacacatcccttctta

SEQ ID NO: 734 - RNA, 19 nt, synthetic construct
  source 1..19: mol_type = other RNA
  modified_base 1: mod_base = OTHER; note = 2'-fluoroguanosine-3'-phosphorothioate
  modified_base 2: mod_base = OTHER; note = 2'-O-methylguanosine-3'-phosphorothioate
  modified_base 3: mod_base = OTHER; note = 2'-fluoroadenosine-3'-phosphate
  modified_base 4: mod_base = OTHER; note = 2'-O-methylcytidine-3'-phosphate
  modified_base 5: mod_base = OTHER; note = 2'-fluoroadenosine-3'-phosphate
  modified_base 6: mod_base = OTHER; note = 2'-O-methylcytidine-3'-phosphate
  modified_base 7: mod_base = OTHER; note = 2'-fluoroadenosine-3'-phosphate
  modified_base 8: mod_base = OTHER; note = 2'-O-methyluridine-3'-phosphate
  modified_base 9: mod_base = OTHER; note = 2'-fluorocytidine-3'-phosphate
  modified_base 10: mod_base = OTHER; note = 2'-O-methylcytidine-3'-phosphate
  modified_base 11: mod_base = OTHER; note = 2'-fluorocytidine-3'-phosphate
  modified_base 12: mod_base = OTHER; note = 2'-O-methyluridine-3'-phosphate
  modified_base 13: mod_base = OTHER; note = 2'-fluorouridine-3'-phosphate
  modified_base 14: mod_base = OTHER; note = 2'-O-methylcytidine-3'-phosphate
  modified_base 15: mod_base = OTHER; note = 2'-fluorouridine-3'-phosphate
  modified_base 16: mod_base = OTHER; note = 2'-O-methyluridine-3'-phosphate
  modified_base 17: mod_base = OTHER; note = 2'-fluorocytidine-3'-phosphorothioate
  modified_base 18: mod_base = OTHER; note = 2'-O-methyluridine-3'-phosphorothioate
  modified_base 19: mod_base = OTHER; note = 2'-fluorouridine
ggacacatcccttcttctt

SEQ ID NO: 735 - RNA, 19 nt, synthetic construct
  source 1..19: mol_type = other RNA
  modified_base 1: mod_base = OTHER; note = 2'-fluoroguanosine-3'-phosphorothioate
  modified_base 2: mod_base = OTHER; note = 2'-O-methyladenosine-3'-phosphorothioate
  modified_base 3: mod_base = OTHER; note = 2'-fluorocytidine-3'-phosphate
  modified_base 4: mod_base = OTHER; note = 2'-O-methyladenosine-3'-phosphate
  modified_base 5: mod_base = OTHER; note = 2'-fluorocytidine-3'-phosphate
  modified_base 6: mod_base = OTHER; note = 2'-O-methyladenosine-3'-phosphate
  modified_base 7: mod_base = OTHER; note = 2'-fluorouridine-3'-phosphate
  modified_base 8: mod_base = OTHER; note = 2'-O-methylcytidine-3'-phosphate
  modified_base 9: mod_base = OTHER; note = 2'-fluorocytidine-3'-phosphate
  modified_base 10: mod_base = OTHER; note = 2'-O-methylcytidine-3'-phosphate
  modified_base 11: mod_base = OTHER; note = 2'-fluorouridine-3'-phosphate
  modified_base 12: mod_base = OTHER; note = 2'-O-methyluridine-3'-phosphate
  modified_base 13: mod_base = OTHER; note = 2'-fluorocytidine-3'-phosphate
  modified_base 14: mod_base = OTHER; note = 2'-O-methyluridine-3'-phosphate
  modified_base 15: mod_base = OTHER; note = 2'-fluorouridine-3'-phosphate
  modified_base 16: mod_base = OTHER; note = 2'-O-methylcytidine-3'-phosphate
  modified_base 17: mod_base = OTHER; note = 2'-fluorouridine-3'-phosphorothioate
  modified_base 18: mod_base = OTHER; note = 2'-O-methyluridine-3'-phosphorothioate
  modified_base 19: mod_base = OTHER; note = 2'-fluorouridine
gacacatcccttcttcttt

SEQ ID NO: 736 - RNA, 19 nt, synthetic construct
  source 1..19: mol_type = other RNA
  modified_base 1: mod_base = OTHER; note = 2'-fluoroadenosine-3'-phosphorothioate
  modified_base 2: mod_base = OTHER; note = 2'-O-methylcytidine-3'-phosphorothioate
  modified_base 3: mod_base = OTHER; note = 2'-fluoroadenosine-3'-phosphate
  modified_base 4: mod_base = OTHER; note = 2'-O-methylcytidine-3'-phosphate
  modified_base 5: mod_base = OTHER; note = 2'-fluoroadenosine-3'-phosphate
  modified_base 6: mod_base = OTHER; note = 2'-O-methyluridine-3'-phosphate
  modified_base 7: mod_base = OTHER; note = 2'-fluorocytidine-3'-phosphate
  modified_base 8: mod_base = OTHER; note = 2'-O-methylcytidine-3'-phosphate
  modified_base 9: mod_base = OTHER; note = 2'-fluorocytidine-3'-phosphate
  modified_base 10: mod_base = OTHER; note = 2'-O-methyluridine-3'-phosphate
  modified_base 11: mod_base = OTHER; note = 2'-fluorouridine-3'-phosphate
  modified_base 12: mod_base = OTHER; note = 2'-O-methylcytidine-3'-phosphate
  modified_base 13: mod_base = OTHER; note = 2'-fluorouridine-3'-phosphate
  modified_base 14: mod_base = OTHER; note = 2'-O-methyluridine-3'-phosphate
  modified_base 15: mod_base = OTHER; note = 2'-fluorocytidine-3'-phosphate
  modified_base 16: mod_base = OTHER; note = 2'-O-methyluridine-3'-phosphate
  modified_base 17: mod_base = OTHER; note = 2'-fluorouridine-3'-phosphorothioate
  modified_base 18: mod_base = OTHER; note = 2'-O-methyluridine-3'-phosphorothioate
  modified_base 19: mod_base = OTHER; note = 2'-fluoroadenosine
acacatcccttcttcttta

SEQ ID NO: 737 - RNA, 19 nt, synthetic construct
  source 1..19: mol_type = other RNA
  modified_base 1: mod_base = OTHER; note = 2'-fluorocytidine-3'-phosphorothioate
  modified_base 2: mod_base = OTHER; note = 2'-O-methyladenosine-3'-phosphorothioate
  modified_base 3: mod_base = OTHER; note = 2'-fluorocytidine-3'-phosphate
  modified_base 4: mod_base = OTHER; note = 2'-O-methyladenosine-3'-phosphate
  modified_base 5: mod_base = OTHER; note = 2'-fluorouridine-3'-phosphate
  modified_base 6: mod_base = OTHER; note = 2'-O-methylcytidine-3'-phosphate
  modified_base 7: mod_base = OTHER; note = 2'-fluorocytidine-3'-phosphate
  modified_base 8: mod_base = OTHER; note = 2'-O-methylcytidine-3'-phosphate
  modified_base 9: mod_base = OTHER; note = 2'-fluorouridine-3'-phosphate
  modified_base 10: mod_base = OTHER; note = 2'-O-methyluridine-3'-phosphate
  modified_base 11: mod_base = OTHER; note = 2'-fluorocytidine-3'-phosphate
  modified_base 12: mod_base = OTHER; note = 2'-O-methyluridine-3'-phosphate
  modified_base 13: mod_base = OTHER; note = 2'-fluorouridine-3'-phosphate
  modified_base 14: mod_base = OTHER; note = 2'-O-methylcytidine-3'-phosphate
  modified_base 15: mod_base = OTHER; note = 2'-fluorouridine-3'-phosphate
  modified_base 16: mod_base = OTHER; note = 2'-O-methyluridine-3'-phosphate
  modified_base 17: mod_base = OTHER; note = 2'-fluorouridine-3'-phosphorothioate
  modified_base 18: mod_base = OTHER; note = 2'-O-methylguanosine-3'-phosphorothioate
  modified_base 19: mod_base = OTHER; note = 2'-fluorouridine
cacatcccttcttctttgt

SEQ ID NO: 738 - RNA, 19 nt, synthetic construct
  source 1..19: mol_type = other RNA
  modified_base 1: mod_base = OTHER; note = 2'-fluorouridine-3'-phosphorothioate
  modified_base 2: mod_base = OTHER; note = 2'-O-methylcytidine-3'-phosphorothioate
  modified_base 3: mod_base = OTHER; note = 2'-fluorocytidine-3'-phosphate
  modified_base 4: mod_base = OTHER; note = 2'-O-methylcytidine-3'-phosphate
  modified_base 5: mod_base = OTHER; note = 2'-fluorouridine-3'-phosphate
  modified_base 6: mod_base = OTHER; note = 2'-O-methyluridine-3'-phosphate
  modified_base 7: mod_base = OTHER; note = 2'-fluorocytidine-3'-phosphate
  modified_base 8: mod_base = OTHER; note = 2'-O-methyluridine-3'-phosphate
  modified_base 9: mod_base = OTHER; note = 2'-fluorouridine-3'-phosphate
  modified_base 10: mod_base = OTHER; note = 2'-O-methylcytidine-3'-phosphate
  modified_base 11: mod_base = OTHER; note = 2'-fluorouridine-3'-phosphate
  modified_base 12: mod_base = OTHER; note = 2'-O-methyluridine-3'-phosphate
  modified_base 13: mod_base = OTHER; note = 2'-fluorouridine-3'-phosphate
  modified_base 14: mod_base = OTHER; note = 2'-O-methylguanosine-3'-phosphate
  modified_base 15: mod_base = OTHER; note = 2'-fluoroguanosine-3'-phosphate
  modified_base 16: mod_base = OTHER; note = 2'-O-methylcytidine-3'-phosphate
  modified_base 17: mod_base = OTHER; note = 2'-fluorocytidine-3'-phosphorothioate
  modified_base 18: mod_base = OTHER; note = 2'-O-methyluridine-3'-phosphorothioate
  modified_base 19: mod_base = OTHER; note = 2'-fluorouridine
tcccttcttctttggcctt

SEQ ID NO: 739 - RNA, 19 nt, synthetic construct
  source 1..19: mol_type = other RNA
  modified_base 1: mod_base = OTHER; note = 2'-fluorocytidine-3'-phosphorothioate
  modified_base 2: mod_base = OTHER; note = 2'-O-methylcytidine-3'-phosphorothioate
  modified_base 3: mod_base = OTHER; note = 2'-fluorocytidine-3'-phosphate
  modified_base 4: mod_base = OTHER; note = 2'-O-methyluridine-3'-phosphate
  modified_base 5: mod_base = OTHER; note = 2'-fluorouridine-3'-phosphate
  modified_base 6: mod_base = OTHER; note = 2'-O-methylcytidine-3'-phosphate
  modified_base 7: mod_base = OTHER; note = 2'-fluorouridine-3'-phosphate
  modified_base 8: mod_base = OTHER; note = 2'-O-methyluridine-3'-phosphate
  modified_base 9: mod_base = OTHER; note = 2'-fluorocytidine-3'-phosphate
  modified_base 10: mod_base = OTHER; note = 2'-O-methyluridine-3'-phosphate
  modified_base 11: mod_base = OTHER; note = 2'-fluorouridine-3'-phosphate
  modified_base 12: mod_base = OTHER; note = 2'-O-methyluridine-3'-phosphate
  modified_base 13: mod_base = OTHER; note = 2'-fluoroguanosine-3'-phosphate
  modified_base 14: mod_base = OTHER; note = 2'-O-methylguanosine-3'-phosphate
  modified_base 15: mod_base = OTHER; note = 2'-fluorocytidine-3'-phosphate
  modified_base 16: mod_base = OTHER; note = 2'-O-methylcytidine-3'-phosphate
  modified_base 17: mod_base = OTHER; note = 2'-fluorouridine-3'-phosphorothioate
  modified_base 18: mod_base = OTHER; note = 2'-O-methylcytidine-3'-phosphorothioate
  modified_base 19: mod_base = OTHER; note = 2'-fluorouridine
cccttcttctttggcctct

SEQ ID NO: 740 - RNA, 19 nt, synthetic construct
  source 1..19: mol_type = other RNA
  modified_base 1: mod_base = OTHER; note = 2'-fluorocytidine-3'-phosphorothioate
  modified_base 2: mod_base = OTHER; note = 2'-O-methyluridine-3'-phosphorothioate
  modified_base 3: mod_base = OTHER; note = 2'-fluorouridine-3'-phosphate
  modified_base 4: mod_base = OTHER; note = 2'-O-methylcytidine-3'-phosphate
  modified_base 5: mod_base = OTHER; note = 2'-fluorouridine-3'-phosphate
  modified_base 6: mod_base = OTHER; note = 2'-O-methyluridine-3'-phosphate
  modified_base 7: mod_base = OTHER; note = 2'-fluorocytidine-3'-phosphate
  modified_base 8: mod_base = OTHER; note = 2'-O-methyluridine-3'-phosphate
  modified_base 9: mod_base = OTHER; note = 2'-fluorouridine-3'-phosphate
  modified_base 10: mod_base = OTHER; note = 2'-O-methyluridine-3'-phosphate
  modified_base 11: mod_base = OTHER; note = 2'-fluoroguanosine-3'-phosphate
  modified_base 12: mod_base = OTHER; note = 2'-O-methylguanosine-3'-phosphate
  modified_base 13: mod_base = OTHER; note = 2'-fluorocytidine-3'-phosphate
  modified_base 14: mod_base = OTHER; note = 2'-O-methylcytidine-3'-phosphate
  modified_base 15: mod_base = OTHER; note = 2'-fluorouridine-3'-phosphate
  modified_base 16: mod_base = OTHER; note = 2'-O-methylcytidine-3'-phosphate
  modified_base 17: mod_base = OTHER; note = 2'-fluoroguanosine-3'-phosphorothioate
  modified_base 18: mod_base = OTHER; note = 2'-O-methyladenosine-3'-phosphorothioate
  modified_base 19: mod_base = OTHER; note = 2'-fluorouridine
cttcttctttggcctcgat

SEQ ID NO: 741 - RNA, 19 nt, synthetic construct
  source 1..19: mol_type = other RNA
  modified_base 1: mod_base = OTHER; note = 2'-fluorouridine-3'-phosphorothioate
  modified_base 2: mod_base = OTHER; note = 2'-O-methyluridine-3'-phosphorothioate
  modified_base 3: mod_base = OTHER; note = 2'-fluorouridine-3'-phosphate
  modified_base 4: mod_base = OTHER; note = 2'-O-methylguanosine-3'-phosphate
  modified_base 5: mod_base = OTHER; note = 2'-fluoroguanosine-3'-phosphate
  modified_base 6: mod_base = OTHER; note = 2'-O-methylcytidine-3'-phosphate
  modified_base 7: mod_base = OTHER; note = 2'-fluorocytidine-3'-phosphate
  modified_base 8: mod_base = OTHER; note = 2'-O-methyluridine-3'-phosphate
  modified_base 9: mod_base = OTHER; note = 2'-fluorocytidine-3'-phosphate
  modified_base 10: mod_base = OTHER; note = 2'-O-methylguanosine-3'-phosphate
  modified_base 11: mod_base = OTHER; note = 2'-fluoroadenosine-3'-phosphate
  modified_base 12: mod_base = OTHER; note = 2'-O-methylcytidine-3'-phosphate
  modified_base 13: mod_base = OTHER; note = 2'-fluorouridine-3'-phosphate
  modified_base 14: mod_base = OTHER; note = 2'-O-methylguanosine-3'-phosphate
  modified_base 15: mod_base = OTHER; note = 2'-fluoroguanosine-3'-phosphate
  modified_base 16: mod_base = OTHER; note = 2'-O-methylguanosine-3'-phosphate
  modified_base 17: mod_base = OTHER; note = 2'-fluoroadenosine-3'-phosphorothioate
  modified_base 18: mod_base = OTHER; note = 2'-O-methyluridine-3'-phosphorothioate
  modified_base 19: mod_base = OTHER; note = 2'-fluorouridine
tttggcctcgactgggatt

SEQ ID NO: 742 - RNA, 19 nt, synthetic construct
  source 1..19: mol_type = other RNA
  modified_base 1: mod_base = OTHER; note = 2'-fluoroguanosine-3'-phosphorothioate
  modified_base 2: mod_base = OTHER; note = 2'-O-methylcytidine-3'-phosphorothioate
  modified_base 3: mod_base = OTHER; note = 2'-fluorocytidine-3'-phosphate
  modified_base 4: mod_base = OTHER; note = 2'-O-methyluridine-3'-phosphate
  modified_base 5: mod_base = OTHER; note = 2'-fluorocytidine-3'-phosphate
  modified_base 6: mod_base = OTHER; note = 2'-O-methylguanosine-3'-phosphate
  modified_base 7: mod_base = OTHER; note = 2'-fluoroadenosine-3'-phosphate
  modified_base 8: mod_base = OTHER; note = 2'-O-methylcytidine-3'-phosphate
  modified_base 9: mod_base = OTHER; note = 2'-fluorouridine-3'-phosphate
  modified_base 10: mod_base = OTHER; note = 2'-O-methylguanosine-3'-phosphate
  modified_base 11: mod_base = OTHER; note = 2'-fluoroguanosine-3'-phosphate
  modified_base 12: mod_base = OTHER; note = 2'-O-methylguanosine-3'-phosphate
  modified_base 13: mod_base = OTHER; note = 2'-fluoroadenosine-3'-phosphate
  modified_base 14: mod_base = OTHER; note = 2'-O-methyluridine-3'-phosphate
  modified_base 15: mod_base = OTHER; note = 2'-fluoroguanosine-3'-phosphate
  modified_base 16: mod_base = OTHER; note = 2'-O-methylguanosine-3'-phosphate
  modified_base 17: mod_base = OTHER; note = 2'-fluorouridine-3'-phosphorothioate
  modified_base 18: mod_base = OTHER; note = 2'-O-methylcytidine-3'-phosphorothioate
  modified_base 19: mod_base = OTHER; note = 2'-fluorouridine
gcctcgactgggatggtct

SEQ ID NO: 743 - RNA, 19 nt, synthetic construct
  source 1..19: mol_type = other RNA
  modified_base 1: mod_base = OTHER; note = 2'-fluorocytidine-3'-phosphorothioate
  modified_base 2: mod_base = OTHER; note = 2'-O-methylcytidine-3'-phosphorothioate
  modified_base 3: mod_base = OTHER; note = 2'-fluorouridine-3'-phosphate
  modified_base 4: mod_base = OTHER; note = 2'-O-methylcytidine-3'-phosphate
  modified_base 5: mod_base = OTHER; note = 2'-fluoroguanosine-3'-phosphate
  modified_base 6: mod_base = OTHER; note = 2'-O-methyladenosine-3'-phosphate
  modified_base 7: mod_base = OTHER; note = 2'-fluorocytidine-3'-phosphate
  modified_base 8: mod_base = OTHER; note = 2'-O-methyluridine-3'-phosphate
  modified_base 9: mod_base = OTHER; note = 2'-fluoroguanosine-3'-phosphate
  modified_base 10: mod_base = OTHER; note = 2'-O-methylguanosine-3'-phosphate
  modified_base 11: mod_base = OTHER; note = 2'-fluoroguanosine-3'-phosphate
  modified_base 12: mod_base = OTHER; note = 2'-O-methyladenosine-3'-phosphate
  modified_base 13: mod_base = OTHER; note = 2'-fluorouridine-3'-phosphate
  modified_base 14: mod_base = OTHER; note = 2'-O-methylguanosine-3'-phosphate
  modified_base 15: mod_base = OTHER; note = 2'-fluoroguanosine-3'-phosphate
  modified_base 16: mod_base = OTHER; note = 2'-O-methyluridine-3'-phosphate
  modified_base 17: mod_base = OTHER; note = 2'-fluorocytidine-3'-phosphorothioate
  modified_base 18: mod_base = OTHER; note = 2'-O-methyluridine-3'-phosphorothioate
  modified_base 19: mod_base = OTHER; note = 2'-fluorouridine
cctcgactgggatggtctt

SEQ ID NO: 744 - RNA, 19 nt, synthetic construct
  source 1..19: mol_type = other RNA
  modified_base 1: mod_base = OTHER; note = 2'-fluorocytidine-3'-phosphorothioate
  modified_base 2: mod_base = OTHER; note = 2'-O-methylcytidine-3'-phosphorothioate
  modified_base 3: mod_base = OTHER; note = 2'-fluorouridine-3'-phosphate
  modified_base 4: mod_base = OTHER; note = 2'-O-methyluridine-3'-phosphate
  modified_base 5: mod_base = OTHER; note = 2'-fluorouridine-3'-phosphate
  modified_base 6: mod_base = OTHER; note = 2'-O-methyladenosine-3'-phosphate
  modified_base 7: mod_base = OTHER; note = 2'-fluorocytidine-3'-phosphate
  modified_base 8: mod_base = OTHER; note = 2'-O-methyladenosine-3'-phosphate
  modified_base 9: mod_base = OTHER; note = 2'-fluorocytidine-3'-phosphate
  modified_base 10: mod_base = OTHER; note = 2'-O-methylcytidine-3'-phosphate
  modified_base 11: mod_base = OTHER; note = 2'-fluoroguanosine-3'-phosphate
  modified_base 12: mod_base = OTHER; note = 2'-O-methylguanosine-3'-phosphate
  modified_base 13: mod_base = OTHER; note = 2'-fluoroadenosine-3'-phosphate
  modified_base 14: mod_base = OTHER; note = 2'-O-methyluridine-3'-phosphate
  modified_base 15: mod_base = OTHER; note = 2'-fluorouridine-3'-phosphate
  modified_base 16: mod_base = OTHER; note = 2'-O-methyluridine-3'-phosphate
  modified_base 17: mod_base = OTHER; note = 2'-fluorocytidine-3'-phosphorothioate
  modified_base 18: mod_base = OTHER; note = 2'-O-methylguanosine-3'-phosphorothioate
  modified_base 19: mod_base = OTHER; note = 2'-fluoroadenosine
cctttacaccggatttcga

SEQ ID NO: 745 - RNA, 19 nt, synthetic construct
  source 1..19: mol_type = other RNA
  modified_base 1: mod_base = OTHER; note = 2'-fluorocytidine-3'-phosphorothioate
  modified_base 2: mod_base = OTHER; note = 2'-O-methyluridine-3'-phosphorothioate
  modified_base 3: mod_base = OTHER; note = 2'-fluorouridine-3'-phosphate
  modified_base 4: mod_base = OTHER; note = 2'-O-methyluridine-3'-phosphate
  modified_base 5: mod_base = OTHER; note = 2'-fluoroadenosine-3'-phosphate
  modified_base 6: mod_base = OTHER; note = 2'-O-methylcytidine-3'-phosphate
  modified_base 7: mod_base = OTHER; note = 2'-fluoroadenosine-3'-phosphate
  modified_base 8: mod_base = OTHER; note = 2'-O-methylcytidine-3'-phosphate
  modified_base 9: mod_base = OTHER; note = 2'-fluorocytidine-3'-phosphate
  modified_base 10: mod_base = OTHER; note = 2'-O-methylguanosine-3'-phosphate
  modified_base 11: mod_base = OTHER; note = 2'-fluoroguanosine-3'-phosphate
  modified_base 12: mod_base = OTHER; note = 2'-O-methyladenosine-3'-phosphate
  modified_base 13: mod_base = OTHER; note = 2'-fluorouridine-3'-phosphate
  modified_base 14: mod_base = OTHER; note = 2'-O-methyluridine-3'-phosphate
  modified_base 15: mod_base = OTHER; note = 2'-fluorouridine-3'-phosphate
  modified_base 16: mod_base = OTHER; note = 2'-O-methylcytidine-3'-phosphate
  modified_base 17: mod_base = OTHER; note = 2'-fluoroguanosine-3'-phosphorothioate
  modified_base 18: mod_base = OTHER; note = 2'-O-methyladenosine-3'-phosphorothioate
  modified_base 19: mod_base = OTHER; note = 2'-fluoroadenosine
ctttacaccggatttcgaa

SEQ ID NO: 746 - RNA, 19 nt, synthetic construct
  source 1..19: mol_type = other RNA
  modified_base 1: mod_base = OTHER; note = 2'-fluorouridine-3'-phosphorothioate
  modified_base 2: mod_base = OTHER; note = 2'-O-methyluridine-3'-phosphorothioate
  modified_base 3: mod_base = OTHER; note = 2'-fluorouridine-3'-phosphate
  modified_base 4: mod_base = OTHER; note = 2'-O-methyladenosine-3'-phosphate
  modified_base 5: mod_base = OTHER; note = 2'-fluorocytidine-3'-phosphate
  modified_base 6: mod_base = OTHER; note = 2'-O-methyladenosine-3'-phosphate
  modified_base 7: mod_base = OTHER; note = 2'-fluorocytidine-3'-phosphate
  modified_base 8: mod_base = OTHER; note = 2'-O-methylcytidine-3'-phosphate
  modified_base 9: mod_base = OTHER; note = 2'-fluoroguanosine-3'-phosphate
  modified_base 10: mod_base = OTHER; note = 2'-O-methylguanosine-3'-phosphate
  modified_base 11: mod_base = OTHER; note = 2'-fluoroadenosine-3'-phosphate
  modified_base 12: mod_base = OTHER; note = 2'-O-methyluridine-3'-phosphate
  modified_base 13: mod_base = OTHER; note = 2'-fluorouridine-3'-phosphate
  modified_base 14: mod_base = OTHER; note = 2'-O-methyluridine-3'-phosphate
  modified_base 15: mod_base = OTHER; note = 2'-fluorocytidine-3'-phosphate
  modified_base 16: mod_base = OTHER; note = 2'-O-methylguanosine-3'-phosphate
  modified_base 17: mod_base = OTHER; note = 2'-fluoroadenosine-3'-phosphorothioate
  modified_base 18: mod_base = OTHER; note = 2'-O-methyladenosine-3'-phosphorothioate
  modified_base 19: mod_base = OTHER; note = 2'-fluorouridine
tttacaccggatttcgaat

SEQ ID NO: 747 - RNA, 19 nt, synthetic construct
  source 1..19: mol_type = other RNA
  modified_base 1: mod_base = OTHER; note = 2'-fluorouridine-3'-phosphorothioate
  modified_base 2: mod_base = OTHER; note = 2'-O-methyluridine-3'-phosphorothioate
  modified_base 3: mod_base = OTHER; note = 2'-fluoroadenosine-3'-phosphate
  modified_base 4: mod_base = OTHER; note = 2'-O-methylcytidine-3'-phosphate
  modified_base 5: mod_base = OTHER; note = 2'-fluoroadenosine-3'-phosphate
  modified_base 6: mod_base = OTHER; note = 2'-O-methylcytidine-3'-phosphate
  modified_base 7: mod_base = OTHER; note = 2'-fluorocytidine-3'-phosphate
  modified_base 8: mod_base = OTHER; note = 2'-O-methylguanosine-3'-phosphate
  modified_base 9: mod_base = OTHER; note = 2'-fluoroguanosine-3'-phosphate
  modified_base 10: mod_base = OTHER; note = 2'-O-methyladenosine-3'-phosphate
  modified_base 11: mod_base = OTHER; note = 2'-fluorouridine-3'-phosphate
  modified_base 12: mod_base = OTHER; note = 2'-O-methyluridine-3'-phosphate
  modified_base 13: mod_base = OTHER; note = 2'-fluorouridine-3'-phosphate
  modified_base 14: mod_base = OTHER; note = 2'-O-methylcytidine-3'-phosphate
  modified_base 15: mod_base = OTHER; note = 2'-fluoroguanosine-3'-phosphate
  modified_base 16: mod_base = OTHER; note = 2'-O-methyladenosine-3'-phosphate
  modified_base 17: mod_base = OTHER; note = 2'-fluoroadenosine-3'-phosphorothioate
  modified_base 18: mod_base = OTHER; note = 2'-O-methylguanosine-3'-phosphorothioate
  modified_base 19: mod_base = OTHER; note = 2'-fluorouridine
ttacaccggatttcgaagt

SEQ ID NO: 748 - RNA, 19 nt, synthetic construct
  source 1..19: mol_type = other RNA
  modified_base 1: mod_base = OTHER; note = 2'-fluorouridine-3'-phosphorothioate
  modified_base 2: mod_base = OTHER; note = 2'-O-methyladenosine-3'-phosphorothioate
  modified_base 3: mod_base = OTHER; note = 2'-fluorocytidine-3'-phosphate
  modified_base 4: mod_base = OTHER; note = 2'-O-methyladenosine-3'-phosphate
  modified_base 5: mod_base = OTHER; note = 2'-fluorocytidine-3'-phosphate
  modified_base 6: mod_base = OTHER; note = 2'-O-methylcytidine-3'-phosphate
  modified_base 7: mod_base = OTHER; note = 2'-fluoroguanosine-3'-phosphate
  modified_base 8: mod_base = OTHER; note = 2'-O-methylguanosine-3'-phosphate
  modified_base 9: mod_base = OTHER; note = 2'-fluoroadenosine-3'-phosphate
  modified_base 10: mod_base = OTHER; note = 2'-O-methyluridine-3'-phosphate
  modified_base 11: mod_base = OTHER; note = 2'-fluorouridine-3'-phosphate
  modified_base 12: mod_base = OTHER; note = 2'-O-methyluridine-3'-phosphate
  modified_base 13: mod_base = OTHER; note = 2'-fluorocytidine-3'-phosphate
  modified_base 14: mod_base = OTHER; note = 2'-O-methylguanosine-3'-phosphate
  modified_base 15: mod_base = OTHER; note = 2'-fluoroadenosine-3'-phosphate
  modified_base 16: mod_base = OTHER; note = 2'-O-methyladenosine-3'-phosphate
  modified_base 17: mod_base = OTHER; note = 2'-fluoroguanosine-3'-phosphorothioate
  modified_base 18: mod_base = OTHER; note = 2'-O-methylguanosine-3'-phosphorothioate
  modified_base 19: mod_base = OTHER; note = 2'-fluorouridine
tacaccggatttcgaaggt

SEQ ID NO: 749 - RNA, 19 nt, synthetic construct
  source 1..19: mol_type = other RNA
  modified_base 1: mod_base = OTHER; note = 2'-fluoroadenosine-3'-phosphorothioate
  modified_base 2: mod_base = OTHER; note = 2'-O-methylcytidine-3'-phosphorothioate
  modified_base 3: mod_base = OTHER; note = 2'-fluoroadenosine-3'-phosphate
  modified_base 4: mod_base = OTHER; note = 2'-O-methylcytidine-3'-phosphate
  modified_base 5: mod_base = OTHER; note = 2'-fluorocytidine-3'-phosphate
  modified_base 6: mod_base = OTHER; note = 2'-O-methylguanosine-3'-phosphate
  modified_base 7: mod_base = OTHER; note = 2'-fluoroguanosine-3'-phosphate
  modified_base 8: mod_base = OTHER; note = 2'-O-methyladenosine-3'-phosphate
  modified_base 9: mod_base = OTHER; note = 2'-fluorouridine-3'-phosphate
  modified_base 10: mod_base = OTHER; note = 2'-O-methyluridine-3'-phosphate
  modified_base 11: mod_base = OTHER; note = 2'-fluorouridine-3'-phosphate
  modified_base 12: mod_base = OTHER; note = 2'-O-methylcytidine-3'-phosphate
  modified_base 13: mod_base = OTHER; note = 2'-fluoroguanosine-3'-phosphate
  modified_base 14: mod_base = OTHER; note = 2'-O-methyladenosine-3'-phosphate
  modified_base 15: mod_base = OTHER; note = 2'-fluoroadenosine-3'-phosphate
  modified_base 16: mod_base = OTHER; note = 2'-O-methylguanosine-3'-phosphate
  modified_base 17: mod_base = OTHER; note = 2'-fluoroguanosine-3'-phosphorothioate
  modified_base 18: mod_base = OTHER; note = 2'-O-methyluridine-3'-phosphorothioate
  modified_base 19: mod_base = OTHER; note = 2'-fluorouridine
acaccggatttcgaaggtt

SEQ ID NO: 750 - RNA, 19 nt, synthetic construct
  source 1..19: mol_type = other RNA
  modified_base 1: mod_base = OTHER; note = 2'-fluorocytidine-3'-phosphorothioate
  modified_base 2: mod_base = OTHER; note = 2'-O-methylguanosine-3'-phosphorothioate
  modified_base 3: mod_base = OTHER; note = 2'-fluoroguanosine-3'-phosphate
  modified_base 4: mod_base = OTHER; note = 2'-O-methyladenosine-3'-phosphate
  modified_base 5: mod_base = OTHER; note = 2'-fluorouridine-3'-phosphate
  modified_base 6: mod_base = OTHER; note = 2'-O-methyluridine-3'-phosphate
  modified_base 7: mod_base = OTHER; note = 2'-fluorouridine-3'-phosphate
  modified_base 8: mod_base = OTHER; note = 2'-O-methylcytidine-3'-phosphate
  modified_base 9: mod_base = OTHER; note = 2'-fluoroguanosine-3'-phosphate
  modified_base 10: mod_base = OTHER; note = 2'-O-methyladenosine-3'-phosphate
  modified_base 11: mod_base = OTHER; note = 2'-fluoroadenosine-3'-phosphate
  modified_base 12: mod_base = OTHER; note = 2'-O-methylguanosine-3'-phosphate
  modified_base 13: mod_base = OTHER; note = 2'-fluoroguanosine-3'-phosphate
  modified_base 14: mod_base = OTHER; note = 2'-O-methyluridine-3'-phosphate
  modified_base 15: mod_base = OTHER; note = 2'-fluoroguanosine-3'-phosphate
  modified_base 16: mod_base = OTHER; note = 2'-O-methylcytidine-3'-phosphate
  modified_base 17: mod_base = OTHER; note = 2'-fluorocytidine-3'-phosphorothioate
  modified_base 18: mod_base = OTHER; note = 2'-O-methyladenosine-3'-phosphorothioate
  modified_base 19: mod_base = OTHER; note = 2'-fluorouridine
cggatttcgaaggtgccat

SEQ ID NO: 751 - RNA, 19 nt, synthetic construct
  source 1..19: mol_type = other RNA
  modified_base 1: mod_base = OTHER; note = 2'-fluorouridine-3'-phosphorothioate
  modified_base 2: mod_base = OTHER; note = 2'-O-methylcytidine-3'-phosphorothioate
  modified_base 3: mod_base = OTHER; note = 2'-fluoroguanosine-3'-phosphate
  modified_base 4: mod_base = OTHER; note = 2'-O-methyladenosine-3'-phosphate
  modified_base 5: mod_base = OTHER; note = 2'-fluoroadenosine-3'-phosphate
  modified_base 6: mod_base = OTHER; note = 2'-O-methylguanosine-3'-phosphate
  modified_base 7: mod_base = OTHER; note = 2'-fluoroguanosine-3'-phosphate
  modified_base 8: mod_base = OTHER; note = 2'-O-methyluridine-3'-phosphate
  modified_base 9: mod_base = OTHER; note = 2'-fluoroguanosine-3'-phosphate
  modified_base 10: mod_base = OTHER; note = 2'-O-methylcytidine-3'-phosphate
  modified_base 11: mod_base = OTHER; note = 2'-fluorocytidine-3'-phosphate
  modified_base 12: mod_base = OTHER; note = 2'-O-methyladenosine-3'-phosphate
  modified_base 13: mod_base = OTHER; note = 2'-fluorocytidine-3'-phosphate
  modified_base 14: mod_base = OTHER; note = 2'-O-methylcytidine-3'-phosphate
  modified_base 15: mod_base = OTHER; note = 2'-fluoroguanosine-3'-phosphate
  modified_base 16: mod_base = OTHER; note = 2'-O-methyladenosine-3'-phosphate
  modified_base 17: mod_base = OTHER; note = 2'-fluorocytidine-3'-phosphorothioate
  modified_base 18: mod_base = OTHER; note = 2'-O-methyladenosine-3'-phosphorothioate
  modified_base 19: mod_base = OTHER; note = 2'-fluorouridine
tcgaaggtgccaccgacat

SEQ ID NO: 752 - RNA, 19 nt, synthetic construct
  source 1..19: mol_type = other RNA
  modified_base 1: mod_base = OTHER; note = 2'-fluoroguanosine-3'-phosphorothioate
  modified_base 2: mod_base = OTHER; note = 2'-O-methyladenosine-3'-phosphorothioate
  modified_base 3: mod_base = OTHER; note = 2'-fluoroadenosine-3'-phosphate
  modified_base 4: mod_base = OTHER; note = 2'-O-methylguanosine-3'-phosphate
  modified_base 5: mod_base = OTHER; note = 2'-fluoroguanosine-3'-phosphate
  modified_base 6: mod_base = OTHER; note = 2'-O-methyluridine-3'-phosphate
  modified_base 7: mod_base = OTHER; note = 2'-fluoroguanosine-3'-phosphate
  modified_base 8: mod_base = OTHER; note = 2'-O-methylcytidine-3'-phosphate
  modified_base 9: mod_base = OTHER; note = 2'-fluorocytidine-3'-phosphate
  modified_base 10: mod_base = OTHER; note = 2'-O-methyladenosine-3'-phosphate
  modified_base 11: mod_base = OTHER; note = 2'-fluorocytidine-3'-phosphate
  modified_base 12: mod_base = OTHER; note = 2'-O-methylcytidine-3'-phosphate
  modified_base 13: mod_base = OTHER; note = 2'-fluoroguanosine-3'-phosphate
  modified_base 14: mod_base = OTHER; note = 2'-O-methyladenosine-3'-phosphate
  modified_base 15: mod_base = OTHER; note = 2'-fluorocytidine-3'-phosphate
  modified_base 16: mod_base = OTHER; note = 2'-O-methyladenosine-3'-phosphate
  modified_base 17: mod_base = OTHER; note = 2'-fluorocytidine-3'-phosphorothioate
  modified_base 18: mod_base = OTHER; note = 2'-O-methyladenosine-3'-phosphorothioate
  modified_base 19: mod_base = OTHER; note = 2'-fluorouridine
gaaggtgccaccgacacat

SEQ ID NO: 753 - RNA, 19 nt, synthetic construct
  source 1..19: mol_type = other RNA
  modified_base 1: mod_base = OTHER; note = 2'-fluoroadenosine-3'-phosphorothioate
  modified_base 2: mod_base = OTHER; note = 2'-O-methyladenosine-3'-phosphorothioate
  modified_base 3: mod_base = OTHER; note = 2'-fluoroguanosine-3'-phosphate
  modified_base 4: mod_base = OTHER; note = 2'-O-methylguanosine-3'-phosphate
  modified_base 5: mod_base = OTHER; note = 2'-fluorouridine-3'-phosphate
  modified_base 6: mod_base = OTHER; note = 2'-O-methylguanosine-3'-phosphate
  modified_base 7: mod_base = OTHER; note = 2'-fluorocytidine-3'-phosphate
  modified_base 8: mod_base = OTHER; note = 2'-O-methylcytidine-3'-phosphate
  modified_base 9: mod_base = OTHER; note = 2'-fluoroadenosine-3'-phosphate
  modified_base 10: mod_base = OTHER; note = 2'-O-methylcytidine-3'-phosphate
  modified_base 11: mod_base = OTHER; note = 2'-fluorocytidine-3'-phosphate
  modified_base 12: mod_base = OTHER; note = 2'-O-methylguanosine-3'-phosphate
  modified_base 13: mod_base = OTHER; note = 2'-fluoroadenosine-3'-phosphate
  modified_base 14: mod_base = OTHER; note = 2'-O-methylcytidine-3'-phosphate
  modified_base 15: mod_base = OTHER; note = 2'-fluoroadenosine-3'-phosphate
  modified_base 16: mod_base = OTHER; note = 2'-O-methylcytidine-3'-phosphate
  modified_base 17: mod_base = OTHER; note = 2'-fluoroadenosine-3'-phosphorothioate
  modified_base 18: mod_base = OTHER; note = 2'-O-methyluridine-3'-phosphorothioate
  modified_base 19: mod_base = OTHER; note = 2'-fluorouridine
aaggtgccaccgacacatt

SEQ ID NO: 754 - RNA, 19 nt, synthetic construct
  source 1..19: mol_type = other RNA
  modified_base 1: mod_base = OTHER; note = 2'-fluoroguanosine-3'-phosphorothioate
  modified_base 2: mod_base = OTHER; note = 2'-O-methyluridine-3'-phosphorothioate
  modified_base 3: mod_base = OTHER; note = 2'-fluoroguanosine-3'-phosphate
  modified_base 4: mod_base = OTHER; note = 2'-O-methylcytidine-3'-phosphate
  modified_base 5: mod_base = OTHER; note = 2'-fluorocytidine-3'-phosphate
  modified_base 6: mod_base = OTHER; note = 2'-O-methyladenosine-3'-phosphate
  modified_base 7: mod_base = OTHER; note = 2'-fluorocytidine-3'-phosphate
  modified_base 8: mod_base = OTHER; note = 2'-O-methylcytidine-3'-phosphate
  modified_base 9: mod_base = OTHER; note = 2'-fluoroguanosine-3'-phosphate
  modified_base 10: mod_base = OTHER; note = 2'-O-methyladenosine-3'-phosphate
  modified_base 11: mod_base = OTHER; note = 2'-fluorocytidine-3'-phosphate
  modified_base 12: mod_base = OTHER; note = 2'-O-methyladenosine-3'-phosphate
  modified_base 13: mod_base = OTHER; note = 2'-fluorocytidine-3'-phosphate
  modified_base 14: mod_base = OTHER; note = 2'-O-methyladenosine-3'-phosphate
  modified_base 15: mod_base = OTHER; note = 2'-fluorouridine-3'-phosphate
  modified_base 16: mod_base = OTHER; note = 2'-O-methylguanosine-3'-phosphate
  modified_base 17: mod_base = OTHER; note = 2'-fluorocytidine-3'-phosphorothioate
  modified_base 18: mod_base = OTHER; note = 2'-O-methyladenosine-3'-phosphorothioate
  modified_base 19: mod_base = OTHER; note = 2'-fluoroadenosine
gtgccaccgacacatgcaa

SEQ ID NO: 755 - RNA, 19 nt, synthetic construct
  source 1..19: mol_type = other RNA
  modified_base 1: mod_base = OTHER; note = 2'-fluorouridine-3'-phosphorothioate
  modified_base 2: mod_base = OTHER; note = 2'-O-methylguanosine-3'-phosphorothioate
  modified_base 3: mod_base = OTHER; note = 2'-fluorocytidine-3'-phosphate
  modified_base 4: mod_base = OTHER; note = 2'-O-methylcytidine-3'-phosphate
  modified_base 5: mod_base = OTHER; note = 2'-fluoroadenosine-3'-phosphate
  modified_base 6: mod_base = OTHER; note = 2'-O-methylcytidine-3'-phosphate
  modified_base 7: mod_base = OTHER; note = 2'-fluorocytidine-3'-phosphate
  modified_base 8: mod_base = OTHER; note = 2'-O-methylguanosine-3'-phosphate
  modified_base 9: mod_base = OTHER; note = 2'-fluoroadenosine-3'-phosphate
  modified_base 10: mod_base = OTHER; note = 2'-O-methylcytidine-3'-phosphate
  modified_base 11: mod_base = OTHER; note = 2'-fluoroadenosine-3'-phosphate
  modified_base 12: mod_base = OTHER; note = 2'-O-methylcytidine-3'-phosphate
  modified_base 13: mod_base = OTHER; note = 2'-fluoroadenosine-3'-phosphate
  modified_base 14: mod_base = OTHER; note = 2'-O-methyluridine-3'-phosphate
  modified_base 15: mod_base = OTHER; note = 2'-fluoroguanosine-3'-phosphate
  modified_base 16: mod_base = OTHER; note = 2'-O-methylcytidine-3'-phosphate
  modified_base 17: mod_base = OTHER; note = 2'-fluoroadenosine-3'-phosphorothioate
  modified_base 18: mod_base = OTHER; note = 2'-O-methyladenosine-3'-phosphorothioate
  modified_base 19: mod_base = OTHER; note = 2'-fluorouridine
tgccaccgacacatgcaat

SEQ ID NO: 756 - RNA, 19 nt, synthetic construct
  source 1..19: mol_type = other RNA
  modified_base 1: mod_base = OTHER; note = 2'-fluorocytidine-3'-phosphorothioate
  modified_base 2: mod_base = OTHER; note = 2'-O-methylcytidine-3'-phosphorothioate
  modified_base 3: mod_base = OTHER; note = 2'-fluoroadenosine-3'-phosphate
  modified_base 4: mod_base = OTHER; note = 2'-O-methylcytidine-3'-phosphate
  modified_base 5: mod_base = OTHER; note = 2'-fluorocytidine-3'-phosphate
  modified_base 6: mod_base = OTHER; note = 2'-O-methylguanosine-3'-phosphate
  modified_base 7: mod_base = OTHER; note = 2'-fluoroadenosine-3'-phosphate
  modified_base 8: mod_base = OTHER; note = 2'-O-methylcytidine-3'-phosphate
  modified_base 9: mod_base = OTHER; note = 2'-fluoroadenosine-3'-phosphate
  modified_base 10: mod_base = OTHER; note = 2'-O-methylcytidine-3'-phosphate
  modified_base 11: mod_base = OTHER; note = 2'-fluoroadenosine-3'-phosphate
  modified_base 12: mod_base = OTHER; note = 2'-O-methyluridine-3'-phosphate
  modified_base 13: mod_base = OTHER; note = 2'-fluoroguanosine-3'-phosphate
  modified_base 14: mod_base = OTHER; note = 2'-O-methylcytidine-3'-phosphate
  modified_base 15: mod_base = OTHER; note = 2'-fluoroadenosine-3'-phosphate
  modified_base 16: mod_base = OTHER; note = 2'-O-methyladenosine-3'-phosphate
  modified_base 17: mod_base = OTHER; note = 2'-fluorocytidine-3'-phosphorothioate
  modified_base 18: mod_base = OTHER; note = 2'-O-methyluridine-3'-phosphorothioate
  modified_base 19: mod_base = OTHER; note = 2'-fluorouridine
ccaccgacacatgcaactt

SEQ ID NO: 757 - RNA, 19 nt, synthetic construct
  source 1..19: mol_type = other RNA
  modified_base 1: mod_base = OTHER; note = 2'-fluorocytidine-3'-phosphorothioate
  modified_base 2: mod_base = OTHER; note = 2'-O-methyladenosine-3'-phosphorothioate
  modified_base 3: mod_base = OTHER; note = 2'-fluorocytidine-3'-phosphate
  modified_base 4: mod_base = OTHER; note = 2'-O-methylcytidine-3'-phosphate
  modified_base 5: mod_base = OTHER; note = 2'-fluoroguanosine-3'-phosphate
  modified_base 6: mod_base = OTHER; note = 2'-O-methyladenosine-3'-phosphate
  modified_base 7: mod_base = OTHER; note = 2'-fluorocytidine-3'-phosphate
  modified_base 8: mod_base = OTHER; note = 2'-O-methyladenosine-3'-phosphate
  modified_base 9: mod_base = OTHER; note = 2'-fluorocytidine-3'-phosphate
  modified_base 10: mod_base = OTHER; note = 2'-O-methyladenosine-3'-phosphate
  modified_base 11: mod_base = OTHER; note = 2'-fluorouridine-3'-phosphate
  modified_base 12: mod_base = OTHER; note = 2'-O-methylguanosine-3'-phosphate
  modified_base 13: mod_base = OTHER; note = 2'-fluorocytidine-3'-phosphate
  modified_base 14: mod_base = OTHER; note = 2'-O-methyladenosine-3'-phosphate
  modified_base 15: mod_base = OTHER; note = 2'-fluoroadenosine-3'-phosphate
  modified_base 16: mod_base = OTHER; note = 2'-O-methylcytidine-3'-phosphate
  modified_base 17: mod_base = OTHER; note = 2'-fluorouridine-3'-phosphorothioate
  modified_base 18: mod_base = OTHER; note = 2'-O-methyluridine-3'-phosphorothioate
  modified_base 19: mod_base = OTHER; note = 2'-fluorouridine
caccgacacatgcaacttt

SEQ ID NO: 758 - RNA, 19 nt, synthetic construct
  source 1..19: mol_type = other RNA
  modified_base 1: mod_base = OTHER; note = 2'-fluorocytidine-3'-phosphorothioate
  modified_base 2: mod_base = OTHER; note = 2'-O-methylguanosine-3'-phosphorothioate
  modified_base 3: mod_base = OTHER; note = 2'-fluoroadenosine-3'-phosphate
  modified_base 4: mod_base = OTHER; note = 2'-O-methylcytidine-3'-phosphate
  modified_base 5: mod_base = OTHER; note = 2'-fluoroadenosine-3'-phosphate
  modified_base 6: mod_base = OTHER; note = 2'-O-methylcytidine-3'-phosphate
  modified_base 7: mod_base = OTHER; note = 2'-fluoroadenosine-3'-phosphate
  modified_base 8: mod_base = OTHER; note = 2'-O-methyluridine-3'-phosphate
  modified_base 9: mod_base = OTHER; note = 2'-fluoroguanosine-3'-phosphate
  modified_base 10: mod_base = OTHER; note = 2'-O-methylcytidine-3'-phosphate
  modified_base 11: mod_base = OTHER; note = 2'-fluoroadenosine-3'-phosphate
  modified_base 12: mod_base = OTHER; note = 2'-O-methyladenosine-3'-phosphate
  modified_base 13: mod_base = OTHER; note = 2'-fluorocytidine-3'-phosphate
  modified_base 14: mod_base = OTHER; note = 2'-O-methyluridine-3'-phosphate
  modified_base 15: mod_base = OTHER; note = 2'-fluorouridine-3'-phosphate
  modified_base 16: mod_base = OTHER; note = 2'-O-methylcytidine-3'-phosphate
  modified_base 17: mod_base = OTHER; note = 2'-fluoroguanosine-3'-phosphorothioate
  modified_base 18: mod_base = OTHER; note = 2'-O-methyladenosine-3'-phosphorothioate
  modified_base 19: mod_base = OTHER; note = 2'-fluorouridine
cgacacatgcaacttcgat

SEQ ID NO: 759 - RNA, 19 nt, synthetic construct
  source 1..19: mol_type = other RNA
  modified_base 1: mod_base = OTHER; note = 2'-fluoroguanosine-3'-phosphorothioate
  modified_base 2: mod_base = OTHER; note = 2'-O-methyladenosine-3'-phosphorothioate
  modified_base 3: mod_base = OTHER; note = 2'-fluorocytidine-3'-phosphate
  modified_base 4: mod_base = OTHER; note = 2'-O-methyladenosine-3'-phosphate
  modified_base 5: mod_base = OTHER; note = 2'-fluorocytidine-3'-phosphate
  modified_base 6: mod_base = OTHER; note = 2'-O-methyladenosine-3'-phosphate
  modified_base 7: mod_base = OTHER; note = 2'-fluorouridine-3'-phosphate
  modified_base 8: mod_base = OTHER; note = 2'-O-methylguanosine-3'-phosphate
  modified_base 9: mod_base = OTHER; note = 2'-fluorocytidine-3'-phosphate
  modified_base 10: mod_base = OTHER; note = 2'-O-methyladenosine-3'-phosphate
  modified_base 11: mod_base = OTHER; note = 2'-fluoroadenosine-3'-phosphate
  modified_base 12: mod_base = OTHER; note = 2'-O-methylcytidine-3'-phosphate
  modified_base 13: mod_base = OTHER; note = 2'-fluorouridine-3'-phosphate
  modified_base 14: mod_base = OTHER; note = 2'-O-methyluridine-3'-phosphate
  modified_base 15: mod_base = OTHER; note = 2'-fluorocytidine-3'-phosphate
  modified_base 16: mod_base = OTHER; note = 2'-O-methylguanosine-3'-phosphate
  modified_base 17: mod_base = OTHER; note = 2'-fluoroadenosine-3'-phosphorothioate
  modified_base 18: mod_base = OTHER; note = 2'-O-methylcytidine-3'-phosphorothioate
  modified_base 19: mod_base = OTHER; note = 2'-fluorouridine
gacacatgcaacttcgact

SEQ ID NO: 760 - RNA, 19 nt, synthetic construct
  source 1..19: mol_type = other RNA
  modified_base 1: mod_base = OTHER; note = 2'-fluoroadenosine-3'-phosphorothioate
  modified_base 2: mod_base = OTHER; note = 2'-O-methylcytidine-3'-phosphorothioate
  modified_base 3: mod_base = OTHER; note = 2'-fluoroadenosine-3'-phosphate
  modified_base 4: mod_base = OTHER; note = 2'-O-methylcytidine-3'-phosphate
  modified_base 5: mod_base = OTHER; note = 2'-fluoroadenosine-3'-phosphate
  modified_base 6: mod_base = OTHER; note = 2'-O-methyluridine-3'-phosphate
  modified_base 7: mod_base = OTHER; note = 2'-fluoroguanosine-3'-phosphate
  modified_base 8: mod_base = OTHER; note = 2'-O-methylcytidine-3'-phosphate
  modified_base 9: mod_base = OTHER; note = 2'-fluoroadenosine-3'-phosphate
  modified_base 10: mod_base = OTHER; note = 2'-O-methyladenosine-3'-phosphate
  modified_base 11: mod_base = OTHER; note = 2'-fluorocytidine-3'-phosphate
  modified_base 12: mod_base = OTHER; note = 2'-O-methyluridine-3'-phosphate
  modified_base 13: mod_base = OTHER; note = 2'-fluorouridine-3'-phosphate
  modified_base 14: mod_base = OTHER; note = 2'-O-methylcytidine-3'-phosphate
  modified_base 15: mod_base = OTHER; note = 2'-fluoroguanosine-3'-phosphate
  modified_base 16: mod_base = OTHER; note = 2'-O-methyladenosine-3'-phosphate
  modified_base 17: mod_base = OTHER; note = 2'-fluorocytidine-3'-phosphorothioate
  modified_base 18: mod_base = OTHER; note = 2'-O-methyluridine-3'-phosphorothioate
  modified_base 19: mod_base = OTHER; note = 2'-fluorouridine
acacatgcaacttcgactt

SEQ ID NO: 761 - RNA, 19 nt, synthetic construct
  source 1..19: mol_type = other RNA
  modified_base 1: mod_base = OTHER; note = 2'-fluorocytidine-3'-phosphorothioate
  modified_base 2: mod_base = OTHER; note = 2'-O-methyladenosine-3'-phosphorothioate
  modified_base 3: mod_base = OTHER; note = 2'-fluorocytidine-3'-phosphate
  modified_base 4: mod_base = OTHER; note = 2'-O-methyladenosine-3'-phosphate
  modified_base 5: mod_base = OTHER; note = 2'-fluorouridine-3'-phosphate
  modified_base 6: mod_base = OTHER; note = 2'-O-methylguanosine-3'-phosphate
  modified_base 7: mod_base = OTHER; note = 2'-fluorocytidine-3'-phosphate
  modified_base 8: mod_base = OTHER; note = 2'-O-methyladenosine-3'-phosphate
  modified_base 9: mod_base = OTHER; note = 2'-fluoroadenosine-3'-phosphate
  modified_base 10: mod_base = OTHER; note = 2'-O-methylcytidine-3'-phosphate
  modified_base 11: mod_base = OTHER; note = 2'-fluorouridine-3'-phosphate
  modified_base 12: mod_base = OTHER; note = 2'-O-methyluridine-3'-phosphate
  modified_base 13: mod_base = OTHER; note = 2'-fluorocytidine-3'-phosphate
  modified_base 14: mod_base = OTHER; note = 2'-O-methylguanosine-3'-phosphate
  modified_base 15: mod_base = OTHER; note = 2'-fluoroadenosine-3'-phosphate
  modified_base 16: mod_base = OTHER; note = 2'-O-methylcytidine-3'-phosphate
  modified_base 17: mod_base = OTHER; note = 2'-fluorouridine-3'-phosphorothioate
  modified_base 18: mod_base = OTHER; note = 2'-O-methyluridine-3'-phosphorothioate
  modified_base 19: mod_base = OTHER; note = 2'-fluoroadenosine
cacatgcaacttcgactta

SEQ ID NO: 762 - RNA, 19 nt, synthetic construct
  source 1..19: mol_type = other RNA
  modified_base 1: mod_base = OTHER; note = 2'-fluoroadenosine-3'-phosphorothioate
  modified_base 2: mod_base = OTHER; note = 2'-O-methylcytidine-3'-phosphorothioate
  modified_base 3: mod_base = OTHER; note = 2'-fluoroadenosine-3'-phosphate
  modified_base 4: mod_base = OTHER; note = 2'-O-methyluridine-3'-phosphate
  modified_base 5: mod_base = OTHER; note = 2'-fluoroguanosine-3'-phosphate
  modified_base 6: mod_base = OTHER; note = 2'-O-methylcytidine-3'-phosphate
  modified_base 7: mod_base = OTHER; note = 2'-fluoroadenosine-3'-phosphate
  modified_base 8: mod_base = OTHER; note = 2'-O-methyladenosine-3'-phosphate
  modified_base 9: mod_base = OTHER; note = 2'-fluorocytidine-3'-phosphate
  modified_base 10: mod_base = OTHER; note = 2'-O-methyluridine-3'-phosphate
  modified_base 11: mod_base = OTHER; note = 2'-fluorouridine-3'-phosphate
  modified_base 12: mod_base = OTHER; note = 2'-O-methylcytidine-3'-phosphate
  modified_base 13: mod_base = OTHER; note = 2'-fluoroguanosine-3'-phosphate
  modified_base 14: mod_base = OTHER; note = 2'-O-methyladenosine-3'-phosphate
  modified_base 15: mod_base = OTHER; note = 2'-fluorocytidine-3'-phosphate
  modified_base 16: mod_base = OTHER; note = 2'-O-methyluridine-3'-phosphate
  modified_base 17: mod_base = OTHER; note = 2'-fluorouridine-3'-phosphorothioate
  modified_base 18: mod_base = OTHER; note = 2'-O-methylguanosine-3'-phosphorothioate
  modified_base 19: mod_base = OTHER; note = 2'-fluorouridine
acatgcaacttcgacttgt

SEQ ID NO: 763 - RNA, 19 nt, synthetic construct
  source 1..19: mol_type = other RNA
  modified_base 1: mod_base = OTHER; note = 2'-fluoroadenosine-3'-phosphorothioate
  modified_base 2: mod_base = OTHER; note = 2'-O-methyluridine-3'-phosphorothioate
  modified_base 3: mod_base = OTHER; note = 2'-fluoroguanosine-3'-phosphate
  modified_base 4: mod_base = OTHER; note = 2'-O-methylcytidine-3'-phosphate
  modified_base 5: mod_base = OTHER; note = 2'-fluoroadenosine-3'-phosphate
  modified_base 6: mod_base = OTHER; note = 2'-O-methyladenosine-3'-phosphate
  modified_base 7: mod_base = OTHER; note = 2'-fluorocytidine-3'-phosphate
  modified_base 8: mod_base = OTHER; note = 2'-O-methyluridine-3'-phosphate
  modified_base 9: mod_base = OTHER; note = 2'-fluorouridine-3'-phosphate
  modified_base 10: mod_base = OTHER; note = 2'-O-methylcytidine-3'-phosphate
  modified_base 11: mod_base = OTHER; note = 2'-fluoroguanosine-3'-phosphate
  modified_base 12: mod_base = OTHER; note = 2'-O-methyladenosine-3'-phosphate
  modified_base 13: mod_base = OTHER; note = 2'-fluorocytidine-3'-phosphate
  modified_base 14: mod_base = OTHER; note = 2'-O-methyluridine-3'-phosphate
  modified_base 15: mod_base = OTHER; note = 2'-fluorouridine-3'-phosphate
  modified_base 16: mod_base = OTHER; note = 2'-O-methylguanosine-3'-phosphate
  modified_base 17: mod_base = OTHER; note = 2'-fluoroguanosine-3'-phosphorothioate
  modified_base 18: mod_base = OTHER; note = 2'-O-methyluridine-3'-phosphorothioate
  modified_base 19: mod_base = OTHER; note = 2'-fluorouridine
atgcaacttcgacttggtt

SEQ ID NO: 764 - RNA, 19 nt, synthetic construct
  source 1..19: mol_type = other RNA
  modified_base 1: mod_base = OTHER; note = 2'-fluorocytidine-3'-phosphorothioate
  modified_base 2: mod_base = OTHER; note = 2'-O-methyladenosine-3'-phosphorothioate
  modified_base 3: mod_base = OTHER; note = 2'-fluoroadenosine-3'-phosphate
  modified_base 4: mod_base = OTHER; note = 2'-O-methylcytidine-3'-phosphate
  modified_base 5: mod_base = OTHER; note = 2'-fluorouridine-3'-phosphate
  modified_base 6: mod_base = OTHER; note = 2'-O-methyluridine-3'-phosphate
  modified_base 7: mod_base = OTHER; note = 2'-fluorocytidine-3'-phosphate
  modified_base 8: mod_base = OTHER; note = 2'-O-methylguanosine-3'-phosphate
  modified_base 9: mod_base = OTHER; note = 2'-fluoroadenosine-3'-phosphate
  modified_base 10: mod_base = OTHER; note = 2'-O-methylcytidine-3'-phosphate
  modified_base 11: mod_base = OTHER; note = 2'-fluorouridine-3'-phosphate
  modified_base 12: mod_base = OTHER; note = 2'-O-methyluridine-3'-phosphate
  modified_base 13: mod_base = OTHER; note = 2'-fluoroguanosine-3'-phosphate
  modified_base 14: mod_base = OTHER; note = 2'-O-methylguanosine-3'-phosphate
  modified_base 15: mod_base = OTHER; note = 2'-fluorouridine-3'-phosphate
  modified_base 16: mod_base = OTHER; note = 2'-O-methylguanosine-3'-phosphate
  modified_base 17: mod_base = OTHER; note = 2'-fluoroguanosine-3'-phosphorothioate
  modified_base 18: mod_base = OTHER; note = 2'-O-methyladenosine-3'-phosphorothioate
  modified_base 19: mod_base = OTHER; note = 2'-fluorouridine
caacttcgacttggtggat

SEQ ID NO: 765 - RNA, 19 nt, synthetic construct
  source 1..19: mol_type = other RNA
  modified_base 1: mod_base = OTHER; note = 2'-fluorocytidine-3'-phosphorothioate
  modified_base 2: mod_base = OTHER; note = 2'-O-methyluridine-3'-phosphorothioate
  modified_base 3: mod_base = OTHER; note = 2'-fluorouridine-3'-phosphate
  modified_base 4: mod_base = OTHER; note = 2'-O-methylcytidine-3'-phosphate
  modified_base 5: mod_base = OTHER; note = 2'-fluoroguanosine-3'-phosphate
  modified_base 6: mod_base = OTHER; note = 2'-O-methyladenosine-3'-phosphate
  modified_base 7: mod_base = OTHER; note = 2'-fluorocytidine-3'-phosphate
  modified_base 8: mod_base = OTHER; note = 2'-O-methyluridine-3'-phosphate
  modified_base 9: mod_base = OTHER; note = 2'-fluorouridine-3'-phosphate
  modified_base 10: mod_base = OTHER; note = 2'-O-methylguanosine-3'-phosphate
  modified_base 11: mod_base = OTHER; note = 2'-fluoroguanosine-3'-phosphate
  modified_base 12: mod_base = OTHER; note = 2'-O-methyluridine-3'-phosphate
  modified_base 13: mod_base = OTHER; note = 2'-fluoroguanosine-3'-phosphate
  modified_base 14: mod_base = OTHER; note = 2'-O-methylguanosine-3'-phosphate
  modified_base 15: mod_base = OTHER; note = 2'-fluoroadenosine-3'-phosphate
  modified_base 16: mod_base = OTHER; note = 2'-O-methylguanosine-3'-phosphate
  modified_base 17: mod_base = OTHER; note = 2'-fluoroguanosine-3'-phosphorothioate
  modified_base 18: mod_base = OTHER; note = 2'-O-methyladenosine-3'-phosphorothioate
  modified_base 19: mod_base = OTHER; note = 2'-fluorocytidine
cttcgacttggtggaggac

SEQ ID NO: 766 - RNA, 19 nt, synthetic construct
  source 1..19: mol_type = other RNA
  modified_base 1: mod_base = OTHER; note = 2'-fluorocytidine-3'-phosphorothioate
  modified_base 2: mod_base = OTHER; note = 2'-O-methyluridine-3'-phosphorothioate
  modified_base 3: mod_base = OTHER; note = 2'-fluoroguanosine-3'-phosphate
  modified_base 4: mod_base = OTHER; note = 2'-O-methyluridine-3'-phosphate
  modified_base 5: mod_base = OTHER; note = 2'-fluorocytidine-3'-phosphate
  modified_base 6: mod_base = OTHER; note = 2'-O-methylguanosine-3'-phosphate
  modified_base 7: mod_base = OTHER; note = 2'-fluoroguanosine-3'-phosphate
  modified_base 8: mod_base = OTHER; note = 2'-O-methyladenosine-3'-phosphate
  modified_base 9: mod_base = OTHER; note = 2'-fluorocytidine-3'-phosphate
  modified_base 10: mod_base = OTHER; note = 2'-O-methyladenosine-3'-phosphate
  modified_base 11: mod_base = OTHER; note = 2'-fluorouridine-3'-phosphate
  modified_base 12: mod_base = OTHER; note = 2'-O-methyluridine-3'-phosphate
  modified_base 13: mod_base = OTHER; note = 2'-fluorocytidine-3'-phosphate
  modified_base 14: mod_base = OTHER; note = 2'-O-methylguanosine-3'-phosphate
  modified_base 15: mod_base = OTHER; note = 2'-fluoroguanosine-3'-phosphate
  modified_base 16: mod_base = OTHER; note = 2'-O-methylguanosine-3'-phosphate
  modified_base 17: mod_base = OTHER; note = 2'-fluoroadenosine-3'-phosphorothioate
  modified_base 18: mod_base = OTHER; note = 2'-O-methyladenosine-3'-phosphorothioate
  modified_base 19: mod_base = OTHER; note = 2'-fluorouridine
ctgtcggacattcgggaat

SEQ ID NO: 767 - RNA, 19 nt, synthetic construct
  source 1..19: mol_type = other RNA
  modified_base 1: mod_base = OTHER; note = 2'-fluorocytidine-3'-phosphorothioate
  modified_base 2: mod_base = OTHER; note = 2'-O-methylguanosine-3'-phosphorothioate
  modified_base 3: mod_base = OTHER; note = 2'-fluoroguanosine-3'-phosphate
  modified_base 4: mod_base = OTHER; note = 2'-O-methyladenosine-3'-phosphate
  modified_base 5: mod_base = OTHER; note = 2'-fluorocytidine-3'-phosphate
  modified_base 6: mod_base = OTHER; note = 2'-O-methyladenosine-3'-phosphate
  modified_base 7: mod_base = OTHER; note = 2'-fluorouridine-3'-phosphate
  modified_base 8: mod_base = OTHER; note = 2'-O-methyluridine-3'-phosphate
  modified_base 9: mod_base = OTHER; note = 2'-fluorocytidine-3'-phosphate
  modified_base 10: mod_base = OTHER; note = 2'-O-methylguanosine-3'-phosphate
  modified_base 11: mod_base = OTHER; note = 2'-fluoroguanosine-3'-phosphate
  modified_base 12: mod_base = OTHER; note = 2'-O-methylguanosine-3'-phosphate
  modified_base 13: mod_base = OTHER; note = 2'-fluoroadenosine-3'-phosphate
  modified_base 14: mod_base = OTHER; note = 2'-O-methyladenosine-3'-phosphate
  modified_base 15: mod_base = OTHER; note = 2'-fluoroguanosine-3'-phosphate
  modified_base 16: mod_base = OTHER; note = 2'-O-methylguanosine-3'-phosphate
  modified_base 17: mod_base = OTHER; note = 2'-fluorouridine-3'-phosphorothioate
  modified_base 18: mod_base = OTHER; note = 2'-O-methylguanosine-3'-phosphorothioate
  modified_base 19: mod_base = OTHER; note = 2'-fluorocytidine
cggacattcgggaaggtgc

SEQ ID NO: 768 - RNA, 19 nt, synthetic construct
  source 1..19: mol_type = other RNA
  modified_base 1: mod_base = OTHER; note = 2'-fluoroguanosine-3'-phosphorothioate
  modified_base 2: mod_base = OTHER; note = 2'-O-methylcytidine-3'-phosphorothioate
  modified_base 3: mod_base = OTHER; note = 2'-fluorouridine-3'-phosphate
  modified_base 4: mod_base = OTHER; note = 2'-O-methyladenosine-3'-phosphate
  modified_base 5: mod_base = OTHER; note = 2'-fluorocytidine-3'-phosphate
  modified_base 6: mod_base = OTHER; note = 2'-O-methyluridine-3'-phosphate
  modified_base 7: mod_base = OTHER; note = 2'-fluorocytidine-3'-phosphate
  modified_base 8: mod_base = OTHER; note = 2'-O-methylcytidine-3'-phosphate
  modified_base 9: mod_base = OTHER; note = 2'-fluorouridine-3'-phosphate
  modified_base 10: mod_base = OTHER; note = 2'-O-methyladenosine-3'-phosphate
  modified_base 11: mod_base = OTHER; note = 2'-fluorocytidine-3'-phosphate
  modified_base 12: mod_base = OTHER; note = 2'-O-methyluridine-3'-phosphate
  modified_base 13: mod_base = OTHER; note = 2'-fluorocytidine-3'-phosphate
  modified_base 14: mod_base = OTHER; note = 2'-O-methylcytidine-3'-phosphate
  modified_base 15: mod_base = OTHER; note = 2'-fluorouridine-3'-phosphate
  modified_base 16: mod_base = OTHER; note = 2'-O-methylguanosine-3'-phosphate
  modified_base 17: mod_base = OTHER; note = 2'-fluorocytidine-3'-phosphorothioate
  modified_base 18: mod_base = OTHER; note = 2'-O-methyladenosine-3'-phosphorothioate
  modified_base 19: mod_base = OTHER; note = 2'-fluorouridine
gctactcctactcctgcat

SEQ ID NO: 769 - RNA, 19 nt, synthetic construct
  source 1..19: mol_type = other RNA
  modified_base 1: mod_base = OTHER; note = 2'-fluorocytidine-3'-phosphorothioate
  modified_base 2: mod_base = OTHER; note = 2'-O-methyluridine-3'-phosphorothioate
  modified_base 3: mod_base = OTHER; note = 2'-fluoroadenosine-3'-phosphate
  modified_base 4: mod_base = OTHER; note = 2'-O-methylcytidine-3'-phosphate
  modified_base 5: mod_base = OTHER; note = 2'-fluorouridine-3'-phosphate
  modified_base 6: mod_base = OTHER; note = 2'-O-methylcytidine-3'-phosphate
  modified_base 7: mod_base = OTHER; note = 2'-fluorocytidine-3'-phosphate
  modified_base 8: mod_base = OTHER; note = 2'-O-methyluridine-3'-phosphate
  modified_base 9: mod_base = OTHER; note = 2'-fluoroadenosine-3'-phosphate
  modified_base 10: mod_base = OTHER; note = 2'-O-methylcytidine-3'-phosphate
  modified_base 11: mod_base = OTHER; note = 2'-fluorouridine-3'-phosphate
  modified_base 12: mod_base = OTHER; note = 2'-O-methylcytidine-3'-phosphate
  modified_base 13: mod_base = OTHER; note = 2'-fluorocytidine-3'-phosphate
  modified_base 14: mod_base = OTHER; note = 2'-O-methyluridine-3'-phosphate
  modified_base 15: mod_base = OTHER; note = 2'-fluoroguanosine-3'-phosphate
  modified_base 16: mod_base = OTHER; note = 2'-O-methylcytidine-3'-phosphate
  modified_base 17: mod_base = OTHER; note = 2'-fluoroadenosine-3'-phosphorothioate
  modified_base 18: mod_base = OTHER; note = 2'-O-methyluridine-3'-phosphorothioate
  modified_base 19: mod_base = OTHER; note = 2'-fluorouridine
ctactcctactcctgcatt

SEQ ID NO: 770 - RNA, 19 nt, synthetic construct
  source 1..19: mol_type = other RNA
  modified_base 1: mod_base = OTHER; note = 2'-fluorocytidine-3'-phosphorothioate
  modified_base 2: mod_base = OTHER; note = 2'-O-methyladenosine-3'-phosphorothioate
  modified_base 3: mod_base = OTHER; note = 2'-fluorocytidine-3'-phosphate
  modified_base 4: mod_base = OTHER; note = 2'-O-methyladenosine-3'-phosphate
  modified_base 5: mod_base = OTHER; note = 2'-fluorocytidine-3'-phosphate
  modified_base 6: mod_base = OTHER; note = 2'-O-methylcytidine-3'-phosphate
  modified_base 7: mod_base = OTHER; note = 2'-fluorocytidine-3'-phosphate
  modified_base 8: mod_base = OTHER; note = 2'-O-methyladenosine-3'-phosphate
  modified_base 9: mod_base = OTHER; note = 2'-fluorouridine-3'-phosphate
  modified_base 10: mod_base = OTHER; note = 2'-O-methylguanosine-3'-phosphate
  modified_base 11: mod_base = OTHER; note = 2'-fluoroguanosine-3'-phosphate
  modified_base 12: mod_base = OTHER; note = 2'-O-methyladenosine-3'-phosphate
  modified_base 13: mod_base = OTHER; note = 2'-fluoroadenosine-3'-phosphate
  modified_base 14: mod_base = OTHER; note = 2'-O-methylcytidine-3'-phosphate
  modified_base 15: mod_base = OTHER; note = 2'-fluorouridine-3'-phosphate
  modified_base 16: mod_base = OTHER; note = 2'-O-methylguanosine-3'-phosphate
  modified_base 17: mod_base = OTHER; note = 2'-fluoroguanosine-3'-phosphorothioate
  modified_base 18: mod_base = OTHER; note = 2'-O-methyladenosine-3'-phosphorothioate
  modified_base 19: mod_base = OTHER; note = 2'-fluorouridine
cacacccatggaactggat

SEQ ID NO: 771 - RNA, 19 nt, synthetic construct
  source 1..19: mol_type = other RNA
  modified_base 1: mod_base = OTHER; note = 2'-fluorocytidine-3'-phosphorothioate
  modified_base 2: mod_base = OTHER; note = 2'-O-methyladenosine-3'-phosphorothioate
  modified_base 3: mod_base = OTHER; note = 2'-fluorouridine-3'-phosphate
  modified_base 4: mod_base = OTHER; note = 2'-O-methylguanosine-3'-phosphate
  modified_base 5: mod_base = OTHER; note = 2'-fluoroguanosine-3'-phosphate
  modified_base 6: mod_base = OTHER; note = 2'-O-methyladenosine-3'-phosphate
  modified_base 7: mod_base = OTHER; note = 2'-fluoroadenosine-3'-phosphate
  modified_base 8: mod_base = OTHER; note = 2'-O-methylcytidine-3'-phosphate
  modified_base 9: mod_base = OTHER; note = 2'-fluorouridine-3'-phosphate
  modified_base 10: mod_base = OTHER; note = 2'-O-methylguanosine-3'-phosphate
  modified_base 11: mod_base = OTHER; note = 2'-fluoroguanosine-3'-phosphate
  modified_base 12: mod_base = OTHER; note = 2'-O-methyladenosine-3'-phosphate
  modified_base 13: mod_base = OTHER; note = 2'-fluoroguanosine-3'-phosphate
  modified_base 14: mod_base = OTHER; note = 2'-O-methylguanosine-3'-phosphate
  modified_base 15: mod_base = OTHER; note = 2'-fluorocytidine-3'-phosphate
  modified_base 16: mod_base = OTHER; note = 2'-O-methylcytidine-3'-phosphate
  modified_base 17: mod_base = OTHER; note = 2'-fluoroguanosine-3'-phosphorothioate
  modified_base 18: mod_base = OTHER; note = 2'-O-methyladenosine-3'-phosphorothioate
  modified_base 19: mod_base = OTHER; note = 2'-fluorouridine
catggaactggaggccgat

SEQ ID NO: 772 - RNA, 19 nt, synthetic construct
  source 1..19: mol_type = other RNA
  modified_base 1: mod_base = OTHER; note = 2'-fluoroguanosine-3'-phosphorothioate
  modified_base 2: mod_base = OTHER; note = 2'-O-methylcytidine-3'-phosphorothioate
  modified_base 3: mod_base = OTHER; note = 2'-fluoroadenosine-3'-phosphate
  modified_base 4: mod_base = OTHER; note = 2'-O-methylguanosine-3'-phosphate
  modified_base 5: mod_base = OTHER; note = 2'-fluorocytidine-3'-phosphate
  modified_base 6: mod_base = OTHER; note = 2'-O-methyluridine-3'-phosphate
  modified_base 7: mod_base = OTHER; note = 2'-fluoroguanosine-3'-phosphate
  modified_base 8: mod_base = OTHER; note = 2'-O-methylcytidine-3'-phosphate
  modified_base 9: mod_base = OTHER; note = 2'-fluorouridine-3'-phosphate
  modified_base 10: mod_base = OTHER; note = 2'-O-methyluridine-3'-phosphate
  modified_base 11: mod_base = OTHER; note = 2'-fluoroguanosine-3'-phosphate
  modified_base 12: mod_base = OTHER; note = 2'-O-methyladenosine-3'-phosphate
  modified_base 13: mod_base = OTHER; note = 2'-fluoroguanosine-3'-phosphate
  modified_base 14: mod_base = OTHER; note = 2'-O-methylcytidine-3'-phosphate
  modified_base 15: mod_base = OTHER; note = 2'-fluorocytidine-3'-phosphate
  modified_base 16: mod_base = OTHER; note = 2'-O-methyladenosine-3'-phosphate
  modified_base 17: mod_base = OTHER; note = 2'-fluorocytidine-3'-phosphorothioate
  modified_base 18: mod_base = OTHER; note = 2'-O-methyladenosine-3'-phosphorothioate
  modified_base 19: mod_base = OTHER; note = 2'-fluorouridine
gcagctgcttgagccacat

SEQ ID NO: 773 - RNA, 19 nt, synthetic construct
  source 1..19: mol_type = other RNA
  modified_base 1: mod_base = OTHER; note = 2'-fluoroguanosine-3'-phosphorothioate
  modified_base 2: mod_base = OTHER; note = 2'-O-methylcytidine-3'-phosphorothioate
  modified_base 3: mod_base = OTHER; note = 2'-fluorouridine-3'-phosphate
  modified_base 4: mod_base = OTHER; note = 2'-O-methylguanosine-3'-phosphate
  modified_base 5: mod_base = OTHER; note = 2'-fluorocytidine-3'-phosphate
  modified_base 6: mod_base = OTHER; note = 2'-O-methyluridine-3'-phosphate
  modified_base 7: mod_base = OTHER; note = 2'-fluorouridine-3'-phosphate
  modified_base 8: mod_base = OTHER; note = 2'-O-methylguanosine-3'-phosphate
  modified_base 9: mod_base = OTHER; note = 2'-fluoroadenosine-3'-phosphate
  modified_base 10: mod_base = OTHER; note = 2'-O-methylguanosine-3'-phosphate
  modified_base 11: mod_base = OTHER; note = 2'-fluorocytidine-3'-phosphate
  modified_base 12: mod_base = OTHER; note = 2'-O-methylcytidine-3'-phosphate
  modified_base 13: mod_base = OTHER; note = 2'-fluoroadenosine-3'-phosphate
  modified_base 14: mod_base = OTHER; note = 2'-O-methylcytidine-3'-phosphate
  modified_base 15: mod_base = OTHER; note = 2'-fluoroadenosine-3'-phosphate
  modified_base 16: mod_base = OTHER; note = 2'-O-methylcytidine-3'-phosphate
  modified_base 17: mod_base = OTHER; note = 2'-fluoroguanosine-3'-phosphorothioate
  modified_base 18: mod_base = OTHER; note = 2'-O-methyluridine-3'-phosphorothioate
  modified_base 19: mod_base = OTHER; note = 2'-fluorouridine
gctgcttgagccacacgtt

SEQ ID NO: 774 - RNA, 19 nt, synthetic construct
  source 1..19: mol_type = other RNA
  modified_base 1: mod_base = OTHER; note = 2'-fluorocytidine-3'-phosphorothioate
  modified_base 2: mod_base = OTHER; note = 2'-O-methyluridine-3'-phosphorothioate
  modified_base 3: mod_base = OTHER; note = 2'-fluorouridine-3'-phosphate
  modified_base 4: mod_base = OTHER; note = 2'-O-methylguanosine-3'-phosphate
  modified_base 5: mod_base = OTHER; note = 2'-fluoroadenosine-3'-phosphate
  modified_base 6: mod_base = OTHER; note = 2'-O-methylguanosine-3'-phosphate
  modified_base 7: mod_base = OTHER; note = 2'-fluorocytidine-3'-phosphate
  modified_base 8: mod_base = OTHER; note = 2'-O-methylcytidine-3'-phosphate
  modified_base 9: mod_base = OTHER; note = 2'-fluoroadenosine-3'-phosphate
  modified_base 10: mod_base = OTHER; note = 2'-O-methylcytidine-3'-phosphate
  modified_base 11: mod_base = OTHER; note = 2'-fluoroadenosine-3'-phosphate
  modified_base 12: mod_base = OTHER; note = 2'-O-methylcytidine-3'-phosphate
  modified_base 13: mod_base = OTHER; note = 2'-fluoroguanosine-3'-phosphate
  modified_base 14: mod_base = OTHER; note = 2'-O-methyluridine-3'-phosphate
  modified_base 15: mod_base = OTHER; note = 2'-fluoroguanosine-3'-phosphate
  modified_base 16: mod_base = OTHER; note = 2'-O-methylcytidine-3'-phosphate
  modified_base 17: mod_base = OTHER; note = 2'-fluoroadenosine-3'-phosphorothioate
  modified_base 18: mod_base = OTHER; note = 2'-O-methyladenosine-3'-phosphorothioate
  modified_base 19: mod_base = OTHER; note = 2'-fluorouridine
cttgagccacacgtgcaat

SEQ ID NO: 775 - RNA, 19 nt, synthetic construct
  source 1..19: mol_type = other RNA
  modified_base 1: mod_base = OTHER; note = 2'-fluoroguanosine-3'-phosphorothioate
  modified_base 2: mod_base = OTHER; note = 2'-O-methylguanosine-3'-phosphorothioate
  modified_base 3: mod_base = OTHER; note = 2'-fluoroadenosine-3'-phosphate
  modified_base 4: mod_base = OTHER; note = 2'-O-methyluridine-3'-phosphate
  modified_base 5: mod_base = OTHER; note = 2'-fluoroguanosine-3'-phosphate
  modified_base 6: mod_base = OTHER; note = 2'-O-methyladenosine-3'-phosphate
  modified_base 7: mod_base = OTHER; note = 2'-fluoroadenosine-3'-phosphate
  modified_base 8: mod_base = OTHER; note = 2'-O-methyladenosine-3'-phosphate
  modified_base 9: mod_base = OTHER; note = 2'-fluorocytidine-3'-phosphate
  modified_base 10: mod_base = OTHER; note = 2'-O-methyladenosine-3'-phosphate
  modified_base 11: mod_base = OTHER; note = 2'-fluoroguanosine-3'-phosphate
  modified_base 12: mod_base = OTHER; note = 2'-O-methylcytidine-3'-phosphate
  modified_base 13: mod_base = OTHER; note = 2'-fluorouridine-3'-phosphate
  modified_base 14: mod_base = OTHER; note = 2'-O-methylguanosine-3'-phosphate
  modified_base 15: mod_base = OTHER; note = 2'-fluoroadenosine-3'-phosphate
  modified_base 16: mod_base = OTHER; note = 2'-O-methyladenosine-3'-phosphate
  modified_base 17: mod_base = OTHER; note = 2'-fluoroguanosine-3'-phosphorothioate
  modified_base 18: mod_base = OTHER; note = 2'-O-methyluridine-3'-phosphorothioate
  modified_base 19: mod_base = OTHER; note = 2'-fluorouridine
ggatgaaacagctgaagtt

SEQ ID NO: 776 - RNA, 19 nt, synthetic construct
  source 1..19: mol_type = other RNA
  modified_base 1: mod_base = OTHER; note = 2'-fluoroguanosine-3'-phosphorothioate
  modified_base 2: mod_base = OTHER; note = 2'-O-methyladenosine-3'-phosphorothioate
  modified_base 3: mod_base = OTHER; note = 2'-fluorouridine-3'-phosphate
  modified_base 4: mod_base = OTHER; note = 2'-O-methylguanosine-3'-phosphate
  modified_base 5: mod_base = OTHER; note = 2'-fluoroadenosine-3'-phosphate
  modified_base 6: mod_base = OTHER; note = 2'-O-methyladenosine-3'-phosphate
  modified_base 7: mod_base = OTHER; note = 2'-fluoroadenosine-3'-phosphate
  modified_base 8: mod_base = OTHER; note = 2'-O-methylcytidine-3'-phosphate
  modified_base 9: mod_base = OTHER; note = 2'-fluoroadenosine-3'-phosphate
  modified_base 10: mod_base = OTHER; note = 2'-O-methylguanosine-3'-phosphate
  modified_base 11: mod_base = OTHER; note = 2'-fluorocytidine-3'-phosphate
  modified_base 12: mod_base = OTHER; note = 2'-O-methyluridine-3'-phosphate
  modified_base 13: mod_base = OTHER; note = 2'-fluoroguanosine-3'-phosphate
  modified_base 14: mod_base = OTHER; note = 2'-O-methyladenosine-3'-phosphate
  modified_base 15: mod_base = OTHER; note = 2'-fluoroadenosine-3'-phosphate
  modified_base 16: mod_base = OTHER; note = 2'-O-methylguanosine-3'-phosphate
  modified_base 17: mod_base = OTHER; note = 2'-fluorouridine-3'-phosphorothioate
  modified_base 18: mod_base = OTHER; note = 2'-O-methylguanosine-3'-phosphorothioate
  modified_base 19: mod_base = OTHER; note = 2'-fluorouridine
gatgaaacagctgaagtgt

SEQ ID NO: 777 - RNA, 19 nt, synthetic construct
  source 1..19: mol_type = other RNA
  modified_base 1: mod_base = OTHER; note = 2'-fluoroguanosine-3'-phosphorothioate
  modified_base 2: mod_base = OTHER; note = 2'-O-methyladenosine-3'-phosphorothioate
  modified_base 3: mod_base = OTHER; note = 2'-fluoroadenosine-3'-phosphate
  modified_base 4: mod_base = OTHER; note = 2'-O-methyladenosine-3'-phosphate
  modified_base 5: mod_base = OTHER; note = 2'-fluorocytidine-3'-phosphate
  modified_base 6: mod_base = OTHER; note = 2'-O-methyladenosine-3'-phosphate
  modified_base 7: mod_base = OTHER; note = 2'-fluoroguanosine-3'-phosphate
  modified_base 8: mod_base = OTHER; note = 2'-O-methylcytidine-3'-phosphate
  modified_base 9: mod_base = OTHER; note = 2'-fluorouridine-3'-phosphate
  modified_base 10: mod_base = OTHER; note = 2'-O-methylguanosine-3'-phosphate
  modified_base 11: mod_base = OTHER; note = 2'-fluoroadenosine-3'-phosphate
  modified_base 12: mod_base = OTHER; note = 2'-O-methyladenosine-3'-phosphate
  modified_base 13: mod_base = OTHER; note = 2'-fluoroguanosine-3'-phosphate
  modified_base 14: mod_base = OTHER; note = 2'-O-methyluridine-3'-phosphate
  modified_base 15: mod_base = OTHER; note = 2'-fluoroguanosine-3'-phosphate
  modified_base 16: mod_base = OTHER; note = 2'-O-methylguanosine-3'-phosphate
  modified_base 17: mod_base = OTHER; note = 2'-fluorocytidine-3'-phosphorothioate
  modified_base 18: mod_base = OTHER; note = 2'-O-methyladenosine-3'-phosphorothioate
  modified_base 19: mod_base = OTHER; note = 2'-fluorouridine
gaaacagctgaagtggcat

SEQ ID NO: 778 - RNA, 19 nt, synthetic construct
  source 1..19: mol_type = other RNA
  modified_base 1: mod_base = OTHER; note = 2'-fluoroadenosine-3'-phosphorothioate
  modified_base 2: mod_base = OTHER; note = 2'-O-methyladenosine-3'-phosphorothioate
  modified_base 3: mod_base = OTHER; note = 2'-fluorocytidine-3'-phosphate
  modified_base 4: mod_base = OTHER; note = 2'-O-methyladenosine-3'-phosphate
  modified_base 5: mod_base = OTHER; note = 2'-fluoroguanosine-3'-phosphate
  modified_base 6: mod_base = OTHER; note = 2'-O-methylcytidine-3'-phosphate
  modified_base 7: mod_base = OTHER; note = 2'-fluorouridine-3'-phosphate
  modified_base 8: mod_base = OTHER; note = 2'-O-methylguanosine-3'-phosphate
  modified_base 9: mod_base = OTHER; note = 2'-fluoroadenosine-3'-phosphate
  modified_base 10: mod_base = OTHER; note = 2'-O-methyladenosine-3'-phosphate
  modified_base 11: mod_base = OTHER; note = 2'-fluoroguanosine-3'-phosphate
  modified_base 12: mod_base = OTHER; note = 2'-O-methyluridine-3'-phosphate
  modified_base 13: mod_base = OTHER; note = 2'-fluoroguanosine-3'-phosphate
  modified_base 14: mod_base = OTHER; note = 2'-O-methylguanosine-3'-phosphate
  modified_base 15: mod_base = OTHER; note = 2'-fluorocytidine-3'-phosphate
  modified_base 16: mod_base = OTHER; note = 2'-O-methyladenosine-3'-phosphate
  modified_base 17: mod_base = OTHER; note = 2'-fluoroguanosine-3'-phosphorothioate
  modified_base 18: mod_base = OTHER; note = 2'-O-methyluridine-3'-phosphorothioate
  modified_base 19: mod_base = OTHER; note = 2'-fluorouridine
aacagctgaagtggcagtt

SEQ ID NO: 779 - RNA, 19 nt, synthetic construct
  source 1..19: mol_type = other RNA
  modified_base 1: mod_base = OTHER; note = 2'-fluoroguanosine-3'-phosphorothioate
  modified_base 2: mod_base = OTHER; note = 2'-O-methylcytidine-3'-phosphorothioate
  modified_base 3: mod_base = OTHER; note = 2'-fluorouridine-3'-phosphate
  modified_base 4: mod_base = OTHER; note = 2'-O-methylguanosine-3'-phosphate
  modified_base 5: mod_base = OTHER; note = 2'-fluoroadenosine-3'-phosphate
  modified_base 6: mod_base = OTHER; note = 2'-O-methyladenosine-3'-phosphate
  modified_base 7: mod_base = OTHER; note = 2'-fluoroguanosine-3'-phosphate
  modified_base 8: mod_base = OTHER; note = 2'-O-methyluridine-3'-phosphate
  modified_base 9: mod_base = OTHER; note = 2'-fluoroguanosine-3'-phosphate
  modified_base 10: mod_base = OTHER; note = 2'-O-methylguanosine-3'-phosphate
  modified_base 11: mod_base = OTHER; note = 2'-fluorocytidine-3'-phosphate
  modified_base 12: mod_base = OTHER; note = 2'-O-methyladenosine-3'-phosphate
  modified_base 13: mod_base = OTHER; note = 2'-fluoroguanosine-3'-phosphate
  modified_base 14: mod_base = OTHER; note = 2'-O-methyluridine-3'-phosphate
  modified_base 15: mod_base = OTHER; note = 2'-fluorouridine-3'-phosphate
  modified_base 16: mod_base = OTHER; note = 2'-O-methylcytidine-3'-phosphate
  modified_base 17: mod_base = OTHER; note = 2'-fluorocytidine-3'-phosphorothioate
  modified_base 18: mod_base = OTHER; note = 2'-O-methyladenosine-3'-phosphorothioate
  modified_base 19: mod_base = OTHER; note = 2'-fluorouridine
gctgaagtggcagttccat

SEQ ID NO: 780 - RNA, 19 nt, synthetic construct
  source 1..19: mol_type = other RNA
  modified_base 1: mod_base = OTHER; note = 2'-fluoroadenosine-3'-phosphorothioate
  modified_base 2: mod_base = OTHER; note = 2'-O-methylguanosine-3'-phosphorothioate
  modified_base 3: mod_base = OTHER; note = 2'-fluorouridine-3'-phosphate
  modified_base 4: mod_base = OTHER; note = 2'-O-methylcytidine-3'-phosphate
  modified_base 5: mod_base = OTHER; note = 2'-fluoroadenosine-3'-phosphate
  modified_base 6: mod_base = OTHER; note = 2'-O-methyladenosine-3'-phosphate
  modified_base 7: mod_base = OTHER; note = 2'-fluorocytidine-3'-phosphate
  modified_base 8: mod_base = OTHER; note = 2'-O-methyluridine-3'-phosphate
  modified_base 9: mod_base = OTHER; note = 2'-fluoroadenosine-3'-phosphate
  modified_base 10: mod_base = OTHER; note = 2'-O-methylcytidine-3'-phosphate
  modified_base 11: mod_base = OTHER; note = 2'-fluoroguanosine-3'-phosphate
  modified_base 12: mod_base = OTHER; note = 2'-O-methylcytidine-3'-phosphate
  modified_base 13: mod_base = OTHER; note = 2'-fluoroguanosine-3'-phosphate
  modified_base 14: mod_base = OTHER; note = 2'-O-methyladenosine-3'-phosphate
  modified_base 15: mod_base = OTHER; note = 2'-fluoroguanosine-3'-phosphate
  modified_base 16: mod_base = OTHER; note = 2'-O-methylguanosine-3'-phosphate
  modified_base 17: mod_base = OTHER; note = 2'-fluorocytidine-3'-phosphorothioate
  modified_base 18: mod_base = OTHER; note = 2'-O-methyladenosine-3'-phosphorothioate
  modified_base 19: mod_base = OTHER; note = 2'-fluorouridine
agtcaactacgcgaggcat

SEQ ID NO: 781 - RNA, 19 nt, synthetic construct
  source 1..19: mol_type = other RNA
  modified_base 1: mod_base = OTHER; note = 2'-fluorouridine-3'-phosphorothioate
  modified_base 2: mod_base = OTHER; note = 2'-O-methylcytidine-3'-phosphorothioate
  modified_base 3: mod_base = OTHER; note = 2'-fluoroadenosine-3'-phosphate
  modified_base 4: mod_base = OTHER; note = 2'-O-methyladenosine-3'-phosphate
  modified_base 5: mod_base = OTHER; note = 2'-fluorocytidine-3'-phosphate
  modified_base 6: mod_base = OTHER; note = 2'-O-methyluridine-3'-phosphate
  modified_base 7: mod_base = OTHER; note = 2'-fluoroadenosine-3'-phosphate
  modified_base 8: mod_base = OTHER; note = 2'-O-methylcytidine-3'-phosphate
  modified_base 9: mod_base = OTHER; note = 2'-fluoroguanosine-3'-phosphate
  modified_base 10: mod_base = OTHER; note = 2'-O-methylcytidine-3'-phosphate
  modified_base 11: mod_base = OTHER; note = 2'-fluoroguanosine-3'-phosphate
  modified_base 12: mod_base = OTHER; note = 2'-O-methyladenosine-3'-phosphate
  modified_base 13: mod_base = OTHER; note = 2'-fluoroguanosine-3'-phosphate
  modified_base 14: mod_base = OTHER; note = 2'-O-methylguanosine-3'-phosphate
  modified_base 15: mod_base = OTHER; note = 2'-fluorocytidine-3'-phosphate
  modified_base 16: mod_base = OTHER; note = 2'-O-methyladenosine-3'-phosphate
  modified_base 17: mod_base = OTHER; note = 2'-fluoroguanosine-3'-phosphorothioate
  modified_base 18: mod_base = OTHER; note = 2'-O-methyladenosine-3'-phosphorothioate
  modified_base 19: mod_base = OTHER; note = 2'-fluorouridine
tcaactacgcgaggcagat

SEQ ID NO: 782 - RNA, 19 nt, synthetic construct
  source 1..19: mol_type = other RNA
  modified_base 1: mod_base = OTHER; note = 2'-fluorocytidine-3'-phosphorothioate
  modified_base 2: mod_base = OTHER; note = 2'-O-methyluridine-3'-phosphorothioate
  modified_base 3: mod_base = OTHER; note = 2'-fluoroadenosine-3'-phosphate
  modified_base 4: mod_base = OTHER; note = 2'-O-methylcytidine-3'-phosphate
  modified_base 5: mod_base = OTHER; note = 2'-fluoroguanosine-3'-phosphate
  modified_base 6: mod_base = OTHER; note = 2'-O-methylcytidine-3'-phosphate
  modified_base 7: mod_base = OTHER; note = 2'-fluoroguanosine-3'-phosphate
  modified_base 8: mod_base = OTHER; note = 2'-O-methyladenosine-3'-phosphate
  modified_base 9: mod_base = OTHER; note = 2'-fluoroguanosine-3'-phosphate
  modified_base 10: mod_base = OTHER; note = 2'-O-methylguanosine-3'-phosphate
  modified_base 11: mod_base = OTHER; note = 2'-fluorocytidine-3'-phosphate
  modified_base 12: mod_base = OTHER; note = 2'-O-methyladenosine-3'-phosphate
  modified_base 13: mod_base = OTHER; note = 2'-fluoroguanosine-3'-phosphate
  modified_base 14: mod_base = OTHER; note = 2'-O-methyladenosine-3'-phosphate
  modified_base 15: mod_base = OTHER; note = 2'-fluoroguanosine-3'-phosphate
  modified_base 16: mod_base = OTHER; note = 2'-O-methylguanosine-3'-phosphate
  modified_base 17: mod_base = OTHER; note = 2'-fluorocytidine-3'-phosphorothioate
  modified_base 18: mod_base = OTHER; note = 2'-O-methyluridine-3'-phosphorothioate
  modified_base 19: mod_base = OTHER; note = 2'-fluorouridine
ctacgcgaggcagaggctt

SEQ ID NO: 783 - RNA, 19 nt, synthetic construct
  source 1..19: mol_type = other RNA
  modified_base 1: mod_base = OTHER; note = 2'-fluorocytidine-3'-phosphorothioate
  modified_base 2: mod_base = OTHER; note = 2'-O-methylguanosine-3'-phosphorothioate
  modified_base 3: mod_base = OTHER; note = 2'-fluoroadenosine-3'-phosphate
  modified_base 4: mod_base = OTHER; note = 2'-O-methylguanosine-3'-phosphate
  modified_base 5: mod_base = OTHER; note = 2'-fluoroguanosine-3'-phosphate
  modified_base 6: mod_base = OTHER; note = 2'-O-methylcytidine-3'-phosphate
  modified_base 7: mod_base = OTHER; note = 2'-fluoroadenosine-3'-phosphate
  modified_base 8: mod_base = OTHER; note = 2'-O-methylguanosine-3'-phosphate
  modified_base 9: mod_base = OTHER; note = 2'-fluoroadenosine-3'-phosphate
  modified_base 10: mod_base = OTHER; note = 2'-O-methylguanosine-3'-phosphate
  modified_base 11: mod_base = OTHER; note = 2'-fluoroguanosine-3'-phosphate
  modified_base 12: mod_base = OTHER; note = 2'-O-methylcytidine-3'-phosphate
  modified_base 13: mod_base = OTHER; note = 2'-fluorouridine-3'-phosphate
  modified_base 14: mod_base = OTHER; note = 2'-O-methylcytidine-3'-phosphate
  modified_base 15: mod_base = OTHER; note = 2'-fluoroguanosine-3'-phosphate
  modified_base 16: mod_base = OTHER; note = 2'-O-methylguanosine-3'-phosphate
  modified_base 17: mod_base = OTHER; note = 2'-fluoroadenosine-3'-phosphorothioate
  modified_base 18: mod_base = OTHER; note = 2'-O-methyladenosine-3'-phosphorothioate
  modified_base 19: mod_base = OTHER; note = 2'-fluorocytidine
cgaggcagaggctcggaac

SEQ ID NO: 784 - RNA, 19 nt, synthetic construct
  source 1..19: mol_type = other RNA
  modified_base 1: mod_base = OTHER; note = 2'-fluoroguanosine-3'-phosphorothioate
  modified_base 2: mod_base = OTHER; note = 2'-O-methylguanosine-3'-phosphorothioate
  modified_base 3: mod_base = OTHER; note = 2'-fluorocytidine-3'-phosphate
  modified_base 4: mod_base = OTHER; note = 2'-O-methyluridine-3'-phosphate
  modified_base 5: mod_base = OTHER; note = 2'-fluorocytidine-3'-phosphate
  modified_base 6: mod_base = OTHER; note = 2'-O-methylguanosine-3'-phosphate
  modified_base 7: mod_base = OTHER; note = 2'-fluoroguanosine-3'-phosphate
  modified_base 8: mod_base = OTHER; note = 2'-O-methyladenosine-3'-phosphate
  modified_base 9: mod_base = OTHER; note = 2'-fluoroadenosine-3'-phosphate
  modified_base 10: mod_base = OTHER; note = 2'-O-methylcytidine-3'-phosphate
  modified_base 11: mod_base = OTHER; note = 2'-fluorocytidine-3'-phosphate
  modified_base 12: mod_base = OTHER; note = 2'-O-methylguanosine-3'-phosphate
  modified_base 13: mod_base = OTHER; note = 2'-fluoroguanosine-3'-phosphate
  modified_base 14: mod_base = OTHER; note = 2'-O-methylguanosine-3'-phosphate
  modified_base 15: mod_base = OTHER; note = 2'-fluoroadenosine-3'-phosphate
  modified_base 16: mod_base = OTHER; note = 2'-O-methylcytidine-3'-phosphate
  modified_base 17: mod_base = OTHER; note = 2'-fluorocytidine-3'-phosphorothioate
  modified_base 18: mod_base = OTHER; note = 2'-O-methyluridine-3'-phosphorothioate
  modified_base 19: mod_base = OTHER; note = 2'-fluoroadenosine
ggctcggaaccgggaccta

SEQ ID NO: 785 - RNA, 19 nt, synthetic construct
  source 1..19: mol_type = other RNA
  modified_base 1: mod_base = OTHER; note = 2'-fluoroguanosine-3'-phosphorothioate
  modified_base 2: mod_base = OTHER; note = 2'-O-methylcytidine-3'-phosphorothioate
  modified_base 3: mod_base = OTHER; note = 2'-fluorouridine-3'-phosphate
  modified_base 4: mod_base = OTHER; note = 2'-O-methylcytidine-3'-phosphate
  modified_base 5: mod_base = OTHER; note = 2'-fluoroguanosine-3'-phosphate
  modified_base 6: mod_base = OTHER; note = 2'-O-methylguanosine-3'-phosphate
  modified_base 7: mod_base = OTHER; note = 2'-fluoroadenosine-3'-phosphate
  modified_base 8: mod_base = OTHER; note = 2'-O-methyladenosine-3'-phosphate
  modified_base 9: mod_base = OTHER; note = 2'-fluorocytidine-3'-phosphate
  modified_base 10: mod_base = OTHER; note = 2'-O-methylcytidine-3'-phosphate
  modified_base 11: mod_base = OTHER; note = 2'-fluoroguanosine-3'-phosphate
  modified_base 12: mod_base = OTHER; note = 2'-O-methylguanosine-3'-phosphate
  modified_base 13: mod_base = OTHER; note = 2'-fluoroguanosine-3'-phosphate
  modified_base 14: mod_base = OTHER; note = 2'-O-methyladenosine-3'-phosphate
  modified_base 15: mod_base = OTHER; note = 2'-fluorocytidine-3'-phosphate
  modified_base 16: mod_base = OTHER; note = 2'-O-methylcytidine-3'-phosphate
  modified_base 17: mod_base = OTHER; note = 2'-fluorouridine-3'-phosphorothioate
  modified_base 18: mod_base = OTHER; note = 2'-O-methyladenosine-3'-phosphorothioate
  modified_base 19: mod_base = OTHER; note = 2'-fluorouridine
gctcggaaccgggacctat

SEQ ID NO: 786 - RNA, 19 nt, synthetic construct
  source 1..19: mol_type = other RNA
  modified_base 1: mod_base = OTHER; note = 2'-fluorouridine-3'-phosphorothioate
  modified_base 2: mod_base = OTHER; note = 2'-O-methylcytidine-3'-phosphorothioate
  modified_base 3: mod_base = OTHER; note = 2'-fluoroguanosine-3'-phosphate
  modified_base 4: mod_base = OTHER; note = 2'-O-methylguanosine-3'-phosphate
  modified_base 5: mod_base = OTHER; note = 2'-fluoroadenosine-3'-phosphate
  modified_base 6: mod_base = OTHER; note = 2'-O-methyladenosine-3'-phosphate
  modified_base 7: mod_base = OTHER; note = 2'-fluorocytidine-3'-phosphate
  modified_base 8: mod_base = OTHER; note = 2'-O-methylcytidine-3'-phosphate
  modified_base 9: mod_base = OTHER; note = 2'-fluoroguanosine-3'-phosphate
  modified_base 10: mod_base = OTHER; note = 2'-O-methylguanosine-3'-phosphate
  modified_base 11: mod_base = OTHER; note = 2'-fluoroguanosine-3'-phosphate
  modified_base 12: mod_base = OTHER; note = 2'-O-methyladenosine-3'-phosphate
  modified_base 13: mod_base = OTHER; note = 2'-fluorocytidine-3'-phosphate
  modified_base 14: mod_base = OTHER; note = 2'-O-methylcytidine-3'-phosphate
  modified_base 15: mod_base = OTHER; note = 2'-fluorouridine-3'-phosphate
  modified_base 16: mod_base = OTHER; note = 2'-O-methyladenosine-3'-phosphate
  modified_base 17: mod_base = OTHER; note = 2'-fluoroguanosine-3'-phosphorothioate
  modified_base 18: mod_base = OTHER; note = 2'-O-methyladenosine-3'-phosphorothioate
  modified_base 19: mod_base = OTHER; note = 2'-fluorouridine
tcggaaccgggacctagat

SEQ ID NO: 787 - RNA, 19 nt, synthetic construct
  source 1..19: mol_type = other RNA
  modified_base 1: mod_base = OTHER; note = 2'-fluoroguanosine-3'-phosphorothioate
  modified_base 2: mod_base = OTHER; note = 2'-O-methylcytidine-3'-phosphorothioate
  modified_base 3: mod_base = OTHER; note = 2'-fluoroadenosine-3'-phosphate
  modified_base 4: mod_base = OTHER; note = 2'-O-methylguanosine-3'-phosphate
  modified_base 5: mod_base = OTHER; note = 2'-fluorouridine-3'-phosphate
  modified_base 6: mod_base = OTHER; note = 2'-O-methyluridine-3'-phosphate
  modified_base 7: mod_base = OTHER; note = 2'-fluoroguanosine-3'-phosphate
  modified_base 8: mod_base = OTHER; note = 2'-O-methylcytidine-3'-phosphate
  modified_base 9: mod_base = OTHER; note = 2'-fluoroadenosine-3'-phosphate
  modified_base 10: mod_base = OTHER; note = 2'-O-methylguanosine-3'-phosphate
  modified_base 11: mod_base = OTHER; note = 2'-fluoroguanosine-3'-phosphate
  modified_base 12: mod_base = OTHER; note = 2'-O-methyladenosine-3'-phosphate
  modified_base 13: mod_base = OTHER; note = 2'-fluoroguanosine-3'-phosphate
  modified_base 14: mod_base = OTHER; note = 2'-O-methylcytidine-3'-phosphate
  modified_base 15: mod_base = OTHER; note = 2'-fluoroguanosine-3'-phosphate
  modified_base 16: mod_base = OTHER; note = 2'-O-methylguanosine-3'-phosphate
  modified_base 17: mod_base = OTHER; note = 2'-fluoroadenosine-3'-phosphorothioate
  modified_base 18: mod_base = OTHER; note = 2'-O-methyluridine-3'-phosphorothioate
  modified_base 19: mod_base = OTHER; note = 2'-fluorouridine
gcagttgcaggagcggatt

SEQ ID NO: 788 - RNA, 19 nt, synthetic construct
  source 1..19: mol_type = other RNA
  modified_base 1: mod_base = OTHER; note = 2'-fluorouridine-3'-phosphorothioate
  modified_base 2: mod_base = OTHER; note = 2'-O-methylguanosine-3'-phosphorothioate
  modified_base 3: mod_base = OTHER; note = 2'-fluorocytidine-3'-phosphate
  modified_base 4: mod_base = OTHER; note = 2'-O-methyladenosine-3'-phosphate
  modified_base 5: mod_base = OTHER; note = 2'-fluoroguanosine-3'-phosphate
  modified_base 6: mod_base = OTHER; note = 2'-O-methylguanosine-3'-phosphate
  modified_base 7: mod_base = OTHER; note = 2'-fluoroadenosine-3'-phosphate
  modified_base 8: mod_base = OTHER; note = 2'-O-methylguanosine-3'-phosphate
  modified_base 9: mod_base = OTHER; note = 2'-fluorocytidine-3'-phosphate
  modified_base 10: mod_base = OTHER; note = 2'-O-methylguanosine-3'-phosphate
  modified_base 11: mod_base = OTHER; note = 2'-fluoroguanosine-3'-phosphate
  modified_base 12: mod_base = OTHER; note = 2'-O-methyladenosine-3'-phosphate
  modified_base 13: mod_base = OTHER; note = 2'-fluorouridine-3'-phosphate
  modified_base 14: mod_base = OTHER; note = 2'-O-methylguanosine-3'-phosphate
  modified_base 15: mod_base = OTHER; note = 2'-fluoroguanosine-3'-phosphate
  modified_base 16: mod_base = OTHER; note = 2'-O-methyladenosine-3'-phosphate
  modified_base 17: mod_base = OTHER; note = 2'-fluoroguanosine-3'-phosphorothioate
  modified_base 18: mod_base = OTHER; note = 2'-O-methyluridine-3'-phosphorothioate
  modified_base 19: mod_base = OTHER; note = 2'-fluorouridine
tgcaggagcggatggagtt

SEQ ID NO: 789 - RNA, 19 nt, synthetic construct
  source 1..19: mol_type = other RNA
  modified_base 1: mod_base = OTHER; note = 2'-fluoroguanosine-3'-phosphorothioate
  modified_base 2: mod_base = OTHER; note = 2'-O-methylcytidine-3'-phosphorothioate
  modified_base 3: mod_base = OTHER; note = 2'-fluoroadenosine-3'-phosphate
  modified_base 4: mod_base = OTHER; note = 2'-O-methylguanosine-3'-phosphate
  modified_base 5: mod_base = OTHER; note = 2'-fluoroguanosine-3'-phosphate
  modified_base 6: mod_base = OTHER; note = 2'-O-methyladenosine-3'-phosphate
  modified_base 7: mod_base = OTHER; note = 2'-fluoroguanosine-3'-phosphate
  modified_base 8: mod_base = OTHER; note = 2'-O-methylcytidine-3'-phosphate
  modified_base 9: mod_base = OTHER; note = 2'-fluoroguanosine-3'-phosphate
  modified_base 10: mod_base = OTHER; note = 2'-O-methylguanosine-3'-phosphate
  modified_base 11: mod_base = OTHER; note = 2'-fluoroadenosine-3'-phosphate
  modified_base 12: mod_base = OTHER; note = 2'-O-methyluridine-3'-phosphate
  modified_base 13: mod_base = OTHER; note = 2'-fluoroguanosine-3'-phosphate
  modified_base 14: mod_base = OTHER; note = 2'-O-methylguanosine-3'-phosphate
  modified_base 15: mod_base = OTHER; note = 2'-fluoroadenosine-3'-phosphate
  modified_base 16: mod_base = OTHER; note = 2'-O-methylguanosine-3'-phosphate
  modified_base 17: mod_base = OTHER; note = 2'-fluorouridine-3'-phosphorothioate
  modified_base 18: mod_base = OTHER; note = 2'-O-methyluridine-3'-phosphorothioate
  modified_base 19: mod_base = OTHER; note = 2'-fluoroadenosine
gcaggagcggatggagtta

SEQ ID NO: 790 - RNA, 19 nt, synthetic construct
  source 1..19: mol_type = other RNA
  modified_base 1: mod_base = OTHER; note = 2'-fluoroguanosine-3'-phosphorothioate
  modified_base 2: mod_base = OTHER; note = 2'-O-methylguanosine-3'-phosphorothioate
  modified_base 3: mod_base = OTHER; note = 2'-fluoroadenosine-3'-phosphate
  modified_base 4: mod_base = OTHER; note = 2'-O-methylguanosine-3'-phosphate
  modified_base 5: mod_base = OTHER; note = 2'-fluorocytidine-3'-phosphate
  modified_base 6: mod_base = OTHER; note = 2'-O-methylguanosine-3'-phosphate
  modified_base 7: mod_base = OTHER; note = 2'-fluoroguanosine-3'-phosphate
  modified_base 8: mod_base = OTHER; note = 2'-O-methyladenosine-3'-phosphate
  modified_base 9: mod_base = OTHER; note = 2'-fluorouridine-3'-phosphate
  modified_base 10: mod_base = OTHER; note = 2'-O-methylguanosine-3'-phosphate
  modified_base 11: mod_base = OTHER; note = 2'-fluoroguanosine-3'-phosphate
  modified_base 12: mod_base = OTHER; note = 2'-O-methyladenosine-3'-phosphate
  modified_base 13: mod_base = OTHER; note = 2'-fluoroguanosine-3'-phosphate
  modified_base 14: mod_base = OTHER; note = 2'-O-methyluridine-3'-phosphate
  modified_base 15: mod_base = OTHER; note = 2'-fluorouridine-3'-phosphate
  modified_base 16: mod_base = OTHER; note = 2'-O-methylguanosine-3'-phosphate
  modified_base 17: mod_base = OTHER; note = 2'-fluorocytidine-3'-phosphorothioate
  modified_base 18: mod_base = OTHER; note = 2'-O-methyluridine-3'-phosphorothioate
  modified_base 19: mod_base = OTHER; note = 2'-fluorouridine
ggagcggatggagttgctt

SEQ ID NO: 791 - RNA, 19 nt, synthetic construct
  source 1..19: mol_type = other RNA
  modified_base 1: mod_base = OTHER; note = 2'-fluorouridine-3'-phosphorothioate
  modified_base 2: mod_base = OTHER; note = 2'-O-methyladenosine-3'-phosphorothioate
  modified_base 3: mod_base = OTHER; note = 2'-fluoroguanosine-3'-phosphate
  modified_base 4: mod_base = OTHER; note = 2'-O-methylguanosine-3'-phosphate
  modified_base 5: mod_base = OTHER; note = 2'-fluorocytidine-3'-phosphate
  modified_base 6: mod_base = OTHER; note = 2'-O-methylcytidine-3'-phosphate
  modified_base 7: mod_base = OTHER; note = 2'-fluorouridine-3'-phosphate
  modified_base 8: mod_base = OTHER; note = 2'-O-methylguanosine-3'-phosphate
  modified_base 9: mod_base = OTHER; note = 2'-fluoroguanosine-3'-phosphate
  modified_base 10: mod_base = OTHER; note = 2'-O-methylcytidine-3'-phosphate
  modified_base 11: mod_base = OTHER; note = 2'-fluorocytidine-3'-phosphate
  modified_base 12: mod_base = OTHER; note = 2'-O-methyluridine-3'-phosphate
  modified_base 13: mod_base = OTHER; note = 2'-fluoroadenosine-3'-phosphate
  modified_base 14: mod_base = OTHER; note = 2'-O-methyluridine-3'-phosphate
  modified_base 15: mod_base = OTHER; note = 2'-fluorocytidine-3'-phosphate
  modified_base 16: mod_base = OTHER; note = 2'-O-methylguanosine-3'-phosphate
  modified_base 17: mod_base = OTHER; note = 2'-fluoroguanosine-3'-phosphorothioate
  modified_base 18: mod_base = OTHER; note = 2'-O-methyladenosine-3'-phosphorothioate
  modified_base 19: mod_base = OTHER; note = 2'-fluorouridine
taggcctggcctatcggat

SEQ ID NO: 792 - RNA, 19 nt, synthetic construct
  source 1..19: mol_type = other RNA
  modified_base 1: mod_base = OTHER; note = 2'-fluoroguanosine-3'-phosphorothioate
  modified_base 2: mod_base = OTHER; note = 2'-O-methylguanosine-3'-phosphorothioate
  modified_base 3: mod_base = OTHER; note = 2'-fluorocytidine-3'-phosphate
  modified_base 4: mod_base = OTHER; note = 2'-O-methylcytidine-3'-phosphate
  modified_base 5: mod_base = OTHER; note = 2'-fluorouridine-3'-phosphate
  modified_base 6: mod_base = OTHER; note = 2'-O-methyladenosine-3'-phosphate
  modified_base 7: mod_base = OTHER; note = 2'-fluorouridine-3'-phosphate
  modified_base 8: mod_base = OTHER; note = 2'-O-methylcytidine-3'-phosphate
  modified_base 9: mod_base = OTHER; note = 2'-fluoroguanosine-3'-phosphate
  modified_base 10: mod_base = OTHER; note = 2'-O-methylguanosine-3'-phosphate
  modified_base 11: mod_base = OTHER; note = 2'-fluoroadenosine-3'-phosphate
  modified_base 12: mod_base = OTHER; note = 2'-O-methylguanosine-3'-phosphate
  modified_base 13: mod_base = OTHER; note = 2'-fluoroguanosine-3'-phosphate
  modified_base 14: mod_base = OTHER; note = 2'-O-methylcytidine-3'-phosphate
  modified_base 15: mod_base = OTHER; note = 2'-fluoroguanosine-3'-phosphate
  modified_base 16: mod_base = OTHER; note = 2'-O-methylcytidine-3'-phosphate
  modified_base 17: mod_base = OTHER; note = 2'-fluorouridine-3'-phosphorothioate
  modified_base 18: mod_base = OTHER; note = 2'-O-methyluridine-3'-phosphorothioate
  modified_base 19: mod_base = OTHER; note = 2'-fluorouridine
ggcctatcggaggcgcttt

SEQ ID NO: 793 - RNA, 19 nt, synthetic construct
  source 1..19: mol_type = other RNA
  modified_base 1: mod_base = OTHER; note = 2'-fluoroguanosine-3'-phosphorothioate
  modified_base 2: mod_base = OTHER; note = 2'-O-methylcytidine-3'-phosphorothioate
  modified_base 3: mod_base = OTHER; note = 2'-fluorocytidine-3'-phosphate
  modified_base 4: mod_base = OTHER; note = 2'-O-methyluridine-3'-phosphate
  modified_base 5: mod_base = OTHER; note = 2'-fluoroadenosine-3'-phosphate
  modified_base 6: mod_base = OTHER; note = 2'-O-methyluridine-3'-phosphate
  modified_base 7: mod_base = OTHER; note = 2'-fluorocytidine-3'-phosphate
  modified_base 8: mod_base = OTHER; note = 2'-O-methylguanosine-3'-phosphate
  modified_base 9: mod_base = OTHER; note = 2'-fluoroguanosine-3'-phosphate
  modified_base 10: mod_base = OTHER; note = 2'-O-methyladenosine-3'-phosphate
  modified_base 11: mod_base = OTHER; note = 2'-fluoroguanosine-3'-phosphate
  modified_base 12: mod_base = OTHER; note = 2'-O-methylguanosine-3'-phosphate
  modified_base 13: mod_base = OTHER; note = 2'-fluorocytidine-3'-phosphate
  modified_base 14: mod_base = OTHER; note = 2'-O-methylguanosine-3'-phosphate
  modified_base 15: mod_base = OTHER; note = 2'-fluorocytidine-3'-phosphate
  modified_base 16: mod_base = OTHER; note = 2'-O-methyluridine-3'-phosphate
  modified_base 17: mod_base = OTHER; note = 2'-fluorouridine-3'-phosphorothioate
  modified_base 18: mod_base = OTHER; note = 2'-O-methyluridine-3'-phosphorothioate
  modified_base 19: mod_base = OTHER; note = 2'-fluoroadenosine
gcctatcggaggcgcttta

SEQ ID NO: 794 - RNA, 19 nt, synthetic construct
  source 1..19: mol_type = other RNA
  modified_base 1: mod_base = OTHER; note = 2'-fluorocytidine-3'-phosphorothioate
  modified_base 2: mod_base = OTHER; note = 2'-O-methylguanosine-3'-phosphorothioate
  modified_base 3: mod_base = OTHER; note = 2'-fluorocytidine-3'-phosphate
  modified_base 4: mod_base = OTHER; note = 2'-O-methyluridine-3'-phosphate
  modified_base 5: mod_base = OTHER; note = 2'-fluorouridine-3'-phosphate
  modified_base 6: mod_base = OTHER; note = 2'-O-methyluridine-3'-phosphate
  modified_base 7: mod_base = OTHER; note = 2'-fluorocytidine-3'-phosphate
  modified_base 8: mod_base = OTHER; note = 2'-O-methylcytidine-3'-phosphate
  modified_base 9: mod_base = OTHER; note = 2'-fluorocytidine-3'-phosphate
  modified_base 10: mod_base = OTHER; note = 2'-O-methyluridine-3'-phosphate
  modified_base 11: mod_base = OTHER; note = 2'-fluoroguanosine-3'-phosphate
  modified_base 12: mod_base = OTHER; note = 2'-O-methylcytidine-3'-phosphate
  modified_base 13: mod_base = OTHER; note = 2'-fluorouridine-3'-phosphate
  modified_base 14: mod_base = OTHER; note = 2'-O-methylcytidine-3'-phosphate
  modified_base 15: mod_base = OTHER; note = 2'-fluorocytidine-3'-phosphate
  modified_base 16: mod_base = OTHER; note = 2'-O-methyluridine-3'-phosphate
  modified_base 17: mod_base = OTHER; note = 2'-fluoroguanosine-3'-phosphorothioate
  modified_base 18: mod_base = OTHER; note = 2'-O-methyluridine-3'-phosphorothioate
  modified_base 19: mod_base = OTHER; note = 2'-fluorouridine
cgctttccctgctcctgtt

SEQ ID NO: 795 - RNA, 19 nt, synthetic construct
  source 1..19: mol_type = other RNA
  modified_base 1: mod_base = OTHER; note = 2'-fluoroguanosine-3'-phosphorothioate
  modified_base 2: mod_base = OTHER; note = 2'-O-methylcytidine-3'-phosphorothioate
  modified_base 3: mod_base = OTHER; note = 2'-fluorouridine-3'-phosphate
  modified_base 4: mod_base = OTHER; note = 2'-O-methyluridine-3'-phosphate
  modified_base 5: mod_base = OTHER; note = 2'-fluorouridine-3'-phosphate
  modified_base 6: mod_base = OTHER; note = 2'-O-methylcytidine-3'-phosphate
  modified_base 7: mod_base = OTHER; note = 2'-fluorocytidine-3'-phosphate
  modified_base 8: mod_base = OTHER; note = 2'-O-methylcytidine-3'-phosphate
  modified_base 9: mod_base = OTHER; note = 2'-fluorouridine-3'-phosphate
  modified_base 10: mod_base = OTHER; note = 2'-O-methylguanosine-3'-phosphate
  modified_base 11: mod_base = OTHER; note = 2'-fluorocytidine-3'-phosphate
  modified_base 12: mod_base = OTHER; note = 2'-O-methyluridine-3'-phosphate
  modified_base 13: mod_base = OTHER; note = 2'-fluorocytidine-3'-phosphate
  modified_base 14: mod_base = OTHER; note = 2'-O-methylcytidine-3'-phosphate
  modified_base 15: mod_base = OTHER; note = 2'-fluorouridine-3'-phosphate
  modified_base 16: mod_base = OTHER; note = 2'-O-methylguanosine-3'-phosphate
  modified_base 17: mod_base = OTHER; note = 2'-fluorouridine-3'-phosphorothioate
  modified_base 18: mod_base = OTHER; note = 2'-O-methyluridine-3'-phosphorothioate
  modified_base 19: mod_base = OTHER; note = 2'-fluoroadenosine
gctttccctgctcctgtta

SEQ ID NO: 796 - RNA, 19 nt, synthetic construct
  source 1..19: mol_type = other RNA
  modified_base 1: mod_base = OTHER; note = 2'-fluorocytidine-3'-phosphorothioate
  modified_base 2: mod_base = OTHER; note = 2'-O-methyluridine-3'-phosphorothioate
  modified_base 3: mod_base = OTHER; note = 2'-fluoroguanosine-3'-phosphate
  modified_base 4: mod_base = OTHER; note = 2'-O-methylcytidine-3'-phosphate
  modified_base 5: mod_base = OTHER; note = 2'-fluorouridine-3'-phosphate
  modified_base 6: mod_base = OTHER; note = 2'-O-methylcytidine-3'-phosphate
  modified_base 7: mod_base = OTHER; note = 2'-fluorocytidine-3'-phosphate
  modified_base 8: mod_base = OTHER; note = 2'-O-methyluridine-3'-phosphate
  modified_base 9: mod_base = OTHER; note = 2'-fluoroguanosine-3'-phosphate
  modified_base 10: mod_base = OTHER; note = 2'-O-methyluridine-3'-phosphate
  modified_base 11: mod_base = OTHER; note = 2'-fluorouridine-3'-phosphate
  modified_base 12: mod_base = OTHER; note = 2'-O-methylcytidine-3'-phosphate
  modified_base 13: mod_base = OTHER; note = 2'-fluoroguanosine-3'-phosphate
  modified_base 14: mod_base = OTHER; note = 2'-O-methylcytidine-3'-phosphate
  modified_base 15: mod_base = OTHER; note = 2'-fluorocytidine-3'-phosphate
  modified_base 16: mod_base = OTHER; note = 2'-O-methylguanosine-3'-phosphate
  modified_base 17: mod_base = OTHER; note = 2'-fluorouridine-3'-phosphorothioate
  modified_base 18: mod_base = OTHER; note = 2'-O-methyluridine-3'-phosphorothioate
  modified_base 19: mod_base = OTHER; note = 2'-fluoroadenosine
ctgctcctgttcgccgtta

SEQ ID NO: 797 - RNA, 19 nt, synthetic construct
  source 1..19: mol_type = other RNA
  modified_base 1: mod_base = OTHER; note = 2'-fluorocytidine-3'-phosphorothioate
  modified_base 2: mod_base = OTHER; note = 2'-O-methylguanosine-3'-phosphorothioate
  modified_base 3: mod_base = OTHER; note = 2'-fluoroguanosine-3'-phosphate
  modified_base 4: mod_base = OTHER; note = 2'-O-methylcytidine-3'-phosphate
  modified_base 5: mod_base = OTHER; note = 2'-fluorocytidine-3'-phosphate
  modified_base 6: mod_base = OTHER; note = 2'-O-methyladenosine-3'-phosphate
  modified_base 7: mod_base = OTHER; note = 2'-fluoroadenosine-3'-phosphate
  modified_base 8: mod_base = OTHER; note = 2'-O-methylcytidine-3'-phosphate
  modified_base 9: mod_base = OTHER; note = 2'-fluorouridine-3'-phosphate
  modified_base 10: mod_base = OTHER; note = 2'-O-methylcytidine-3'-phosphate
  modified_base 11: mod_base = OTHER; note = 2'-fluoroadenosine-3'-phosphate
  modified_base 12: mod_base = OTHER; note = 2'-O-methylcytidine-3'-phosphate
  modified_base 13: mod_base = OTHER; note = 2'-fluorocytidine-3'-phosphate
  modified_base 14: mod_base = OTHER; note = 2'-O-methylguanosine-3'-phosphate
  modified_base 15: mod_base = OTHER; note = 2'-fluorocytidine-3'-phosphate
  modified_base 16: mod_base = OTHER; note = 2'-O-methyladenosine-3'-phosphate
  modified_base 17: mod_base = OTHER; note = 2'-fluoroguanosine-3'-phosphorothioate
  modified_base 18: mod_base = OTHER; note = 2'-O-methyluridine-3'-phosphorothioate
  modified_base 19: mod_base = OTHER; note = 2'-fluorouridine
cggccaactcaccgcagtt

SEQ ID NO: 798 - RNA, 19 nt, synthetic construct
  source 1..19: mol_type = other RNA
  modified_base 1: mod_base = OTHER; note = 2'-fluoroguanosine-3'-phosphorothioate
  modified_base 2: mod_base = OTHER; note = 2'-O-methylcytidine-3'-phosphorothioate
  modified_base 3: mod_base = OTHER; note = 2'-fluorocytidine-3'-phosphate
  modified_base 4: mod_base = OTHER; note = 2'-O-methyladenosine-3'-phosphate
  modified_base 5: mod_base = OTHER; note = 2'-fluoroadenosine-3'-phosphate
  modified_base 6: mod_base = OTHER; note = 2'-O-methylcytidine-3'-phosphate
  modified_base 7: mod_base = OTHER; note = 2'-fluorouridine-3'-phosphate
  modified_base 8: mod_base = OTHER; note = 2'-O-methylcytidine-3'-phosphate
  modified_base 9: mod_base = OTHER; note = 2'-fluoroadenosine-3'-phosphate
  modified_base 10: mod_base = OTHER; note = 2'-O-methylcytidine-3'-phosphate
  modified_base 11: mod_base = OTHER; note = 2'-fluorocytidine-3'-phosphate
  modified_base 12: mod_base = OTHER; note = 2'-O-methylguanosine-3'-phosphate
  modified_base 13: mod_base = OTHER; note = 2'-fluorocytidine-3'-phosphate
  modified_base 14: mod_base = OTHER; note = 2'-O-methyladenosine-3'-phosphate
  modified_base 15: mod_base = OTHER; note = 2'-fluoroguanosine-3'-phosphate
  modified_base 16: mod_base = OTHER; note = 2'-O-methyluridine-3'-phosphate
  modified_base 17: mod_base = OTHER; note = 2'-fluorocytidine-3'-phosphorothioate
  modified_base 18: mod_base = OTHER; note = 2'-O-methyluridine-3'-phosphorothioate
  modified_base 19: mod_base = OTHER; note = 2'-fluorouridine
gccaactcaccgcagtctt

SEQ ID NO: 799 - RNA, 19 nt, synthetic construct
  source 1..19: mol_type = other RNA
  modified_base 1: mod_base = OTHER; note = 2'-fluorocytidine-3'-phosphorothioate
  modified_base 2: mod_base = OTHER; note = 2'-O-methylguanosine-3'-phosphorothioate
  modified_base 3: mod_base = OTHER; note = 2'-fluorocytidine-3'-phosphate
  modified_base 4: mod_base = OTHER; note = 2'-O-methyluridine-3'-phosphate
  modified_base 5: mod_base = OTHER; note = 2'-fluorocytidine-3'-phosphate
  modified_base 6: mod_base = OTHER; note = 2'-O-methylcytidine-3'-phosphate
  modified_base 7: mod_base = OTHER; note = 2'-fluorocytidine-3'-phosphate
  modified_base 8: mod_base = OTHER; note = 2'-O-methyluridine-3'-phosphate
  modified_base 9: mod_base = OTHER; note = 2'-fluoroguanosine-3'-phosphate
  modified_base 10: mod_base = OTHER; note = 2'-O-methyladenosine-3'-phosphate
  modified_base 11: mod_base = OTHER; note = 2'-fluoroadenosine-3'-phosphate
  modified_base 12: mod_base = OTHER; note = 2'-O-methylcytidine-3'-phosphate
  modified_base 13: mod_base = OTHER; note = 2'-fluorocytidine-3'-phosphate
  modified_base 14: mod_base = OTHER; note = 2'-O-methylcytidine-3'-phosphate
  modified_base 15: mod_base = OTHER; note = 2'-fluorouridine-3'-phosphate
  modified_base 16: mod_base = OTHER; note = 2'-O-methyladenosine-3'-phosphate
  modified_base 17: mod_base = OTHER; note = 2'-fluoroguanosine-3'-phosphorothioate
  modified_base 18: mod_base = OTHER; note = 2'-O-methyladenosine-3'-phosphorothioate
  modified_base 19: mod_base = OTHER; note = 2'-fluoroadenosine
cgctccctgaaccctagaa

SEQ ID NO: 800 - RNA, 19 nt, synthetic construct
  source 1..19: mol_type = other RNA
  modified_base 1: mod_base = OTHER; note = 2'-fluoroguanosine-3'-phosphorothioate
  modified_base 2: mod_base = OTHER; note = 2'-O-methylcytidine-3'-phosphorothioate
  modified_base 3: mod_base = OTHER; note = 2'-fluorouridine-3'-phosphate
  modified_base 4: mod_base = OTHER; note = 2'-O-methylcytidine-3'-phosphate
  modified_base 5: mod_base = OTHER; note = 2'-fluorocytidine-3'-phosphate
  modified_base 6: mod_base = OTHER; note = 2'-O-methylcytidine-3'-phosphate
  modified_base 7: mod_base = OTHER; note = 2'-fluorouridine-3'-phosphate
  modified_base 8: mod_base = OTHER; note = 2'-O-methylguanosine-3'-phosphate
  modified_base 9: mod_base = OTHER; note = 2'-fluoroadenosine-3'-phosphate
  modified_base 10: mod_base = OTHER; note = 2'-O-methyladenosine-3'-phosphate
  modified_base 11: mod_base = OTHER; note = 2'-fluorocytidine-3'-phosphate
  modified_base 12: mod_base = OTHER; note = 2'-O-methylcytidine-3'-phosphate
  modified_base 13: mod_base = OTHER; note = 2'-fluorocytidine-3'-phosphate
  modified_base 14: mod_base = OTHER; note = 2'-O-methyluridine-3'-phosphate
  modified_base 15: mod_base = OTHER; note = 2'-fluoroadenosine-3'-phosphate
  modified_base 16: mod_base = OTHER; note = 2'-O-methylguanosine-3'-phosphate
  modified_base 17: mod_base = OTHER; note = 2'-fluoroadenosine-3'-phosphorothioate
  modified_base 18: mod_base = OTHER; note = 2'-O-methyladenosine-3'-phosphorothioate
  modified_base 19: mod_base = OTHER; note = 2'-fluorouridine
gctccctgaaccctagaat

SEQ ID NO: 801 - RNA, 19 nt, synthetic construct
  source 1..19: mol_type = other RNA
  modified_base 1: mod_base = OTHER; note = 2'-fluorocytidine-3'-phosphorothioate
  modified_base 2: mod_base = OTHER; note = 2'-O-methylcytidine-3'-phosphorothioate
  modified_base 3: mod_base = OTHER; note = 2'-fluorouridine-3'-phosphate
  modified_base 4: mod_base = OTHER; note = 2'-O-methylguanosine-3'-phosphate
  modified_base 5: mod_base = OTHER; note = 2'-fluoroadenosine-3'-phosphate
  modified_base 6: mod_base = OTHER; note = 2'-O-methyladenosine-3'-phosphate
  modified_base 7: mod_base = OTHER; note = 2'-fluorocytidine-3'-phosphate
  modified_base 8: mod_base = OTHER; note = 2'-O-methylcytidine-3'-phosphate
  modified_base 9: mod_base = OTHER; note = 2'-fluorocytidine-3'-phosphate
  modified_base 10: mod_base = OTHER; note = 2'-O-methyluridine-3'-phosphate
  modified_base 11: mod_base = OTHER; note = 2'-fluoroadenosine-3'-phosphate
  modified_base 12: mod_base = OTHER; note = 2'-O-methylguanosine-3'-phosphate
  modified_base 13: mod_base = OTHER; note = 2'-fluoroadenosine-3'-phosphate
  modified_base 14: mod_base = OTHER; note = 2'-O-methyladenosine-3'-phosphate
  modified_base 15: mod_base = OTHER; note = 2'-fluorocytidine-3'-phosphate
  modified_base 16: mod_base = OTHER; note = 2'-O-methyluridine-3'-phosphate
  modified_base 17: mod_base = OTHER; note = 2'-fluoroguanosine-3'-phosphorothioate
  modified_base 18: mod_base = OTHER; note = 2'-O-methyluridine-3'-phosphorothioate
  modified_base 19: mod_base = OTHER; note = 2'-fluorocytidine
cctgaaccctagaactgtc

SEQ ID NO: 802 - RNA, 19 nt, synthetic construct
  source 1..19: mol_type = other RNA
  modified_base 1: mod_base = OTHER; note = 2'-fluorocytidine-3'-phosphorothioate
  modified_base 2: mod_base = OTHER; note = 2'-O-methyluridine-3'-phosphorothioate
  modified_base 3: mod_base = OTHER; note = 2'-fluoroguanosine-3'-phosphate
  modified_base 4: mod_base = OTHER; note = 2'-O-methyladenosine-3'-phosphate
  modified_base 5: mod_base = OTHER; note = 2'-fluoroadenosine-3'-phosphate
  modified_base 6: mod_base = OTHER; note = 2'-O-methylcytidine-3'-phosphate
  modified_base 7: mod_base = OTHER; note = 2'-fluorocytidine-3'-phosphate
  modified_base 8: mod_base = OTHER; note = 2'-O-methylcytidine-3'-phosphate
  modified_base 9: mod_base = OTHER; note = 2'-fluorouridine-3'-phosphate
  modified_base 10: mod_base = OTHER; note = 2'-O-methyladenosine-3'-phosphate
  modified_base 11: mod_base = OTHER; note = 2'-fluoroguanosine-3'-phosphate
  modified_base 12: mod_base = OTHER; note = 2'-O-methyladenosine-3'-phosphate
  modified_base 13: mod_base = OTHER; note = 2'-fluoroadenosine-3'-phosphate
  modified_base 14: mod_base = OTHER; note = 2'-O-methylcytidine-3'-phosphate
  modified_base 15: mod_base = OTHER; note = 2'-fluorouridine-3'-phosphate
  modified_base 16: mod_base = OTHER; note = 2'-O-methylguanosine-3'-phosphate
  modified_base 17: mod_base = OTHER; note = 2'-fluorouridine-3'-phosphorothioate
  modified_base 18: mod_base = OTHER; note = 2'-O-methylcytidine-3'-phosphorothioate
  modified_base 19: mod_base = OTHER; note = 2'-fluorouridine
ctgaaccctagaactgtct

SEQ ID NO: 803 - RNA, 19 nt, synthetic construct
  source 1..19: mol_type = other RNA
  modified_base 1: mod_base = OTHER; note = 2'-fluorouridine-3'-phosphorothioate
  modified_base 2: mod_base = OTHER; note = 2'-O-methylguanosine-3'-phosphorothioate
  modified_base 3: mod_base = OTHER; note = 2'-fluoroadenosine-3'-phosphate
  modified_base 4: mod_base = OTHER; note = 2'-O-methyladenosine-3'-phosphate
  modified_base 5: mod_base = OTHER; note = 2'-fluorocytidine-3'-phosphate
  modified_base 6: mod_base = OTHER; note = 2'-O-methylcytidine-3'-phosphate
  modified_base 7: mod_base = OTHER; note = 2'-fluorocytidine-3'-phosphate
  modified_base 8: mod_base = OTHER; note = 2'-O-methyluridine-3'-phosphate
  modified_base 9: mod_base = OTHER; note = 2'-fluoroadenosine-3'-phosphate
  modified_base 10: mod_base = OTHER; note = 2'-O-methylguanosine-3'-phosphate
  modified_base 11: mod_base = OTHER; note = 2'-fluoroadenosine-3'-phosphate
  modified_base 12: mod_base = OTHER; note = 2'-O-methyladenosine-3'-phosphate
  modified_base 13: mod_base = OTHER; note = 2'-fluorocytidine-3'-phosphate
  modified_base 14: mod_base = OTHER; note = 2'-O-methyluridine-3'-phosphate
  modified_base 15: mod_base = OTHER; note = 2'-fluoroguanosine-3'-phosphate
  modified_base 16: mod_base = OTHER; note = 2'-O-methyluridine-3'-phosphate
  modified_base 17: mod_base = OTHER; note = 2'-fluorocytidine-3'-phosphorothioate
  modified_base 18: mod_base = OTHER; note = 2'-O-methyluridine-3'-phosphorothioate
  modified_base 19: mod_base = OTHER; note = 2'-fluorouridine
tgaaccctagaactgtctt

SEQ ID NO: 804 - RNA, 19 nt, synthetic construct
  source 1..19: mol_type = other RNA
  modified_base 1: mod_base = OTHER; note = 2'-fluoroguanosine-3'-phosphorothioate
  modified_base 2: mod_base = OTHER; note = 2'-O-methyladenosine-3'-phosphorothioate
  modified_base 3: mod_base = OTHER; note = 2'-fluoroadenosine-3'-phosphate
  modified_base 4: mod_base = OTHER; note = 2'-O-methylcytidine-3'-phosphate
  modified_base 5: mod_base = OTHER; note = 2'-fluorocytidine-3'-phosphate
  modified_base 6: mod_base = OTHER; note = 2'-O-methylcytidine-3'-phosphate
  modified_base 7: mod_base = OTHER; note = 2'-fluorouridine-3'-phosphate
  modified_base 8: mod_base = OTHER; note = 2'-O-methyladenosine-3'-phosphate
  modified_base 9: mod_base = OTHER; note = 2'-fluoroguanosine-3'-phosphate
  modified_base 10: mod_base = OTHER; note = 2'-O-methyladenosine-3'-phosphate
  modified_base 11: mod_base = OTHER; note = 2'-fluoroadenosine-3'-phosphate
  modified_base 12: mod_base = OTHER; note = 2'-O-methylcytidine-3'-phosphate
  modified_base 13: mod_base = OTHER; note = 2'-fluorouridine-3'-phosphate
  modified_base 14: mod_base = OTHER; note = 2'-O-methylguanosine-3'-phosphate
  modified_base 15: mod_base = OTHER; note = 2'-fluorouridine-3'-phosphate
  modified_base 16: mod_base = OTHER; note = 2'-O-methylcytidine-3'-phosphate
  modified_base 17: mod_base = OTHER; note = 2'-fluorouridine-3'-phosphorothioate
  modified_base 18: mod_base = OTHER; note = 2'-O-methyluridine-3'-phosphorothioate
  modified_base 19: mod_base = OTHER; note = 2'-fluorouridine
gaaccctagaactgtcttt

SEQ ID NO: 805 - RNA, 19 nt, synthetic construct
  source 1..19: mol_type = other RNA
  modified_base 1: mod_base = OTHER; note = 2'-fluoroadenosine-3'-phosphorothioate
  modified_base 2: mod_base = OTHER; note = 2'-O-methyladenosine-3'-phosphorothioate
  modified_base 3: mod_base = OTHER; note = 2'-fluorocytidine-3'-phosphate
  modified_base 4: mod_base = OTHER; note = 2'-O-methylcytidine-3'-phosphate
  modified_base 5: mod_base = OTHER; note = 2'-fluorocytidine-3'-phosphate
  modified_base 6: mod_base = OTHER; note = 2'-O-methyluridine-3'-phosphate
  modified_base 7: mod_base = OTHER; note = 2'-fluoroadenosine-3'-phosphate
  modified_base 8: mod_base = OTHER; note = 2'-O-methylguanosine-3'-phosphate
  modified_base 9: mod_base = OTHER; note = 2'-fluoroadenosine-3'-phosphate
  modified_base 10: mod_base = OTHER; note = 2'-O-methyladenosine-3'-phosphate
  modified_base 11: mod_base = OTHER; note = 2'-fluorocytidine-3'-phosphate
  modified_base 12: mod_base = OTHER; note = 2'-O-methyluridine-3'-phosphate
  modified_base 13: mod_base = OTHER; note = 2'-fluoroguanosine-3'-phosphate
  modified_base 14: mod_base = OTHER; note = 2'-O-methyluridine-3'-phosphate
  modified_base 15: mod_base = OTHER; note = 2'-fluorocytidine-3'-phosphate
  modified_base 16: mod_base = OTHER; note = 2'-O-methyluridine-3'-phosphate
  modified_base 17: mod_base = OTHER; note = 2'-fluorouridine-3'-phosphorothioate
  modified_base 18: mod_base = OTHER; note = 2'-O-methylcytidine-3'-phosphorothioate
  modified_base 19: mod_base = OTHER; note = 2'-fluorouridine
aaccctagaactgtcttct

SEQ ID NO: 806 - RNA, 19 nt, synthetic construct
  source 1..19: mol_type = other RNA
  modified_base 1: mod_base = OTHER; note = 2'-fluoroadenosine-3'-phosphorothioate
  modified_base 2: mod_base = OTHER; note = 2'-O-methylcytidine-3'-phosphorothioate
  modified_base 3: mod_base = OTHER; note = 2'-fluorocytidine-3'-phosphate
  modified_base 4: mod_base = OTHER; note = 2'-O-methylcytidine-3'-phosphate
  modified_base 5: mod_base = OTHER; note = 2'-fluorouridine-3'-phosphate
  modified_base 6: mod_base = OTHER; note = 2'-O-methyladenosine-3'-phosphate
  modified_base 7: mod_base = OTHER; note = 2'-fluoroguanosine-3'-phosphate
  modified_base 8: mod_base = OTHER; note = 2'-O-methyladenosine-3'-phosphate
  modified_base 9: mod_base = OTHER; note = 2'-fluoroadenosine-3'-phosphate
  modified_base 10: mod_base = OTHER; note = 2'-O-methylcytidine-3'-phosphate
  modified_base 11: mod_base = OTHER; note = 2'-fluorouridine-3'-phosphate
  modified_base 12: mod_base = OTHER; note = 2'-O-methylguanosine-3'-phosphate
  modified_base 13: mod_base = OTHER; note = 2'-fluorouridine-3'-phosphate
  modified_base 14: mod_base = OTHER; note = 2'-O-methylcytidine-3'-phosphate
  modified_base 15: mod_base = OTHER; note = 2'-fluorouridine-3'-phosphate
  modified_base 16: mod_base = OTHER; note = 2'-O-methyluridine-3'-phosphate
  modified_base 17: mod_base = OTHER; note = 2'-fluorocytidine-3'-phosphorothioate
  modified_base 18: mod_base = OTHER; note = 2'-O-methylguanosine-3'-phosphorothioate
  modified_base 19: mod_base = OTHER; note = 2'-fluoroadenosine
accctagaactgtcttcga

SEQ ID NO: 807 - RNA, 19 nt, synthetic construct
  source 1..19: mol_type = other RNA
  modified_base 1: mod_base = OTHER; note = 2'-fluorocytidine-3'-phosphorothioate
  modified_base 2: mod_base = OTHER; note = 2'-O-methylcytidine-3'-phosphorothioate
  modified_base 3: mod_base = OTHER; note = 2'-fluorocytidine-3'-phosphate
  modified_base 4: mod_base = OTHER; note = 2'-O-methyluridine-3'-phosphate
  modified_base 5: mod_base = OTHER; note = 2'-fluoroadenosine-3'-phosphate
  modified_base 6: mod_base = OTHER; note = 2'-O-methylguanosine-3'-phosphate
  modified_base 7: mod_base = OTHER; note = 2'-fluoroadenosine-3'-phosphate
  modified_base 8: mod_base = OTHER; note = 2'-O-methyladenosine-3'-phosphate
  modified_base 9: mod_base = OTHER; note = 2'-fluorocytidine-3'-phosphate
  modified_base 10: mod_base = OTHER; note = 2'-O-methyluridine-3'-phosphate
  modified_base 11: mod_base = OTHER; note = 2'-fluoroguanosine-3'-phosphate
  modified_base 12: mod_base = OTHER; note = 2'-O-methyluridine-3'-phosphate
  modified_base 13: mod_base = OTHER; note = 2'-fluorocytidine-3'-phosphate
  modified_base 14: mod_base = OTHER; note = 2'-O-methyluridine-3'-phosphate
  modified_base 15: mod_base = OTHER; note = 2'-fluorouridine-3'-phosphate
  modified_base 16: mod_base = OTHER; note = 2'-O-methylcytidine-3'-phosphate
  modified_base 17: mod_base = OTHER; note = 2'-fluoroguanosine-3'-phosphorothioate
  modified_base 18: mod_base = OTHER; note = 2'-O-methyladenosine-3'-phosphorothioate
  modified_base 19: mod_base = OTHER; note = 2'-fluorouridine
ccctagaactgtcttcgat

SEQ ID NO: 808 - RNA, 19 nt, synthetic construct
  source 1..19: mol_type = other RNA
  modified_base 1: mod_base = OTHER; note = 2'-fluorocytidine-3'-phosphorothioate
  modified_base 2: mod_base = OTHER; note = 2'-O-methylcytidine-3'-phosphorothioate
  modified_base 3: mod_base = OTHER; note = 2'-fluorouridine-3'-phosphate
  modified_base 4: mod_base = OTHER; note = 2'-O-methyladenosine-3'-phosphate
  modified_base 5: mod_base = OTHER; note = 2'-fluoroguanosine-3'-phosphate
  modified_base 6: mod_base = OTHER; note = 2'-O-methyladenosine-3'-phosphate
  modified_base 7: mod_base = OTHER; note = 2'-fluoroadenosine-3'-phosphate
  modified_base 8: mod_base = OTHER; note = 2'-O-methylcytidine-3'-phosphate
  modified_base 9: mod_base = OTHER; note = 2'-fluorouridine-3'-phosphate
  modified_base 10: mod_base = OTHER; note = 2'-O-methylguanosine-3'-phosphate
  modified_base 11: mod_base = OTHER; note = 2'-fluorouridine-3'-phosphate
  modified_base 12: mod_base = OTHER; note = 2'-O-methylcytidine-3'-phosphate
  modified_base 13: mod_base = OTHER; note = 2'-fluorouridine-3'-phosphate
  modified_base 14: mod_base = OTHER; note = 2'-O-methyluridine-3'-phosphate
  modified_base 15: mod_base = OTHER; note = 2'-fluorocytidine-3'-phosphate
  modified_base 16: mod_base = OTHER; note = 2'-O-methylguanosine-3'-phosphate
  modified_base 17: mod_base = OTHER; note = 2'-fluoroadenosine-3'-phosphorothioate
  modified_base 18: mod_base = OTHER; note = 2'-O-methylcytidine-3'-phosphorothioate
  modified_base 19: mod_base = OTHER; note = 2'-fluorouridine
cctagaactgtcttcgact

SEQ ID NO: 809 - RNA, 19 nt, synthetic construct
  source 1..19: mol_type = other RNA
  modified_base 1: mod_base = OTHER; note = 2'-fluorocytidine-3'-phosphorothioate
  modified_base 2: mod_base = OTHER; note = 2'-O-methyluridine-3'-phosphorothioate
  modified_base 3: mod_base = OTHER; note = 2'-fluoroadenosine-3'-phosphate
  modified_base 4: mod_base = OTHER; note = 2'-O-methylguanosine-3'-phosphate
  modified_base 5: mod_base = OTHER; note = 2'-fluoroadenosine-3'-phosphate
  modified_base 6: mod_base = OTHER; note = 2'-O-methyladenosine-3'-phosphate
  modified_base 7: mod_base = OTHER; note = 2'-fluorocytidine-3'-phosphate
  modified_base 8: mod_base = OTHER; note = 2'-O-methyluridine-3'-phosphate
  modified_base 9: mod_base = OTHER; note = 2'-fluoroguanosine-3'-phosphate
  modified_base 10: mod_base = OTHER; note = 2'-O-methyluridine-3'-phosphate
  modified_base 11: mod_base = OTHER; note = 2'-fluorocytidine-3'-phosphate
  modified_base 12: mod_base = OTHER; note = 2'-O-methyluridine-3'-phosphate
  modified_base 13: mod_base = OTHER; note = 2'-fluorouridine-3'-phosphate
  modified_base 14: mod_base = OTHER; note = 2'-O-methylcytidine-3'-phosphate
  modified_base 15: mod_base = OTHER; note = 2'-fluoroguanosine-3'-phosphate
  modified_base 16: mod_base = OTHER; note = 2'-O-methyladenosine-3'-phosphate
  modified_base 17: mod_base = OTHER; note = 2'-fluorocytidine-3'-phosphorothioate
  modified_base 18: mod_base = OTHER; note = 2'-O-methyluridine-3'-phosphorothioate
  modified_base 19: mod_base = OTHER; note = 2'-fluorouridine
ctagaactgtcttcgactt

SEQ ID NO: 810 - RNA, 19 nt, synthetic construct
  source 1..19: mol_type = other RNA
  modified_base 1: mod_base = OTHER; note = 2'-fluorocytidine-3'-phosphorothioate
  modified_base 2: mod_base = OTHER; note = 2'-O-methylcytidine-3'-phosphorothioate
  modified_base 3: mod_base = OTHER; note = 2'-fluoroadenosine-3'-phosphate
  modified_base 4: mod_base = OTHER; note = 2'-O-methylguanosine-3'-phosphate
  modified_base 5: mod_base = OTHER; note = 2'-fluorocytidine-3'-phosphate
  modified_base 6: mod_base = OTHER; note = 2'-O-methyluridine-3'-phosphate
  modified_base 7: mod_base = OTHER; note = 2'-fluorocytidine-3'-phosphate
  modified_base 8: mod_base = OTHER; note = 2'-O-methylcytidine-3'-phosphate
  modified_base 9: mod_base = OTHER; note = 2'-fluoroadenosine-3'-phosphate
  modified_base 10: mod_base = OTHER; note = 2'-O-methylguanosine-3'-phosphate
  modified_base 11: mod_base = OTHER; note = 2'-fluorouridine-3'-phosphate
  modified_base 12: mod_base = OTHER; note = 2'-O-methylcytidine-3'-phosphate
  modified_base 13: mod_base = OTHER; note = 2'-fluorocytidine-3'-phosphate
  modified_base 14: mod_base = OTHER; note = 2'-O-methyluridine-3'-phosphate
  modified_base 15: mod_base = OTHER; note = 2'-fluoroguanosine-3'-phosphate
  modified_base 16: mod_base = OTHER; note = 2'-O-methyluridine-3'-phosphate
  modified_base 17: mod_base = OTHER; note = 2'-fluoroguanosine-3'-phosphorothioate
  modified_base 18: mod_base = OTHER; note = 2'-O-methyladenosine-3'-phosphorothioate
  modified_base 19: mod_base = OTHER; note = 2'-fluorouridine
ccagctccagtcctgtgat

SEQ ID NO: 811 - RNA, 19 nt, synthetic construct
  source 1..19: mol_type = other RNA
  modified_base 1: mod_base = OTHER; note = 2'-fluorocytidine-3'-phosphorothioate
  modified_base 2: mod_base = OTHER; note = 2'-O-methyladenosine-3'-phosphorothioate
  modified_base 3: mod_base = OTHER; note = 2'-fluoroguanosine-3'-phosphate
  modified_base 4: mod_base = OTHER; note = 2'-O-methylcytidine-3'-phosphate
  modified_base 5: mod_base = OTHER; note = 2'-fluorouridine-3'-phosphate
  modified_base 6: mod_base = OTHER; note = 2'-O-methylcytidine-3'-phosphate
  modified_base 7: mod_base = OTHER; note = 2'-fluorocytidine-3'-phosphate
  modified_base 8: mod_base = OTHER; note = 2'-O-methyladenosine-3'-phosphate
  modified_base 9: mod_base = OTHER; note = 2'-fluoroguanosine-3'-phosphate
  modified_base 10: mod_base = OTHER; note = 2'-O-methyluridine-3'-phosphate
  modified_base 11: mod_base = OTHER; note = 2'-fluorocytidine-3'-phosphate
  modified_base 12: mod_base = OTHER; note = 2'-O-methylcytidine-3'-phosphate
  modified_base 13: mod_base = OTHER; note = 2'-fluorouridine-3'-phosphate
  modified_base 14: mod_base = OTHER; note = 2'-O-methylguanosine-3'-phosphate
  modified_base 15: mod_base = OTHER; note = 2'-fluorouridine-3'-phosphate
  modified_base 16: mod_base = OTHER; note = 2'-O-methylguanosine-3'-phosphate
  modified_base 17: mod_base = OTHER; note = 2'-fluoroadenosine-3'-phosphorothioate
  modified_base 18: mod_base = OTHER; note = 2'-O-methyluridine-3'-phosphorothioate
  modified_base 19: mod_base = OTHER; note = 2'-fluorouridine
cagctccagtcctgtgatt

SEQ ID NO: 812 - RNA, 19 nt, synthetic construct
  source 1..19: mol_type = other RNA
  modified_base 1: mod_base = OTHER; note = 2'-fluorocytidine-3'-phosphorothioate
  modified_base 2: mod_base = OTHER; note = 2'-O-methyluridine-3'-phosphorothioate
  modified_base 3: mod_base = OTHER; note = 2'-fluorouridine-3'-phosphate
  modified_base 4: mod_base = OTHER; note = 2'-O-methylguanosine-3'-phosphate
  modified_base 5: mod_base = OTHER; note = 2'-fluorouridine-3'-phosphate
  modified_base 6: mod_base = OTHER; note = 2'-O-methyladenosine-3'-phosphate
  modified_base 7: mod_base = OTHER; note = 2'-fluoroguanosine-3'-phosphate
  modified_base 8: mod_base = OTHER; note = 2'-O-methylcytidine-3'-phosphate
  modified_base 9: mod_base = OTHER; note = 2'-fluorocytidine-3'-phosphate
  modified_base 10: mod_base = OTHER; note = 2'-O-methylguanosine-3'-phosphate
  modified_base 11: mod_base = OTHER; note = 2'-fluoroguanosine-3'-phosphate
  modified_base 12: mod_base = OTHER; note = 2'-O-methylguanosine-3'-phosphate
  modified_base 13: mod_base = OTHER; note = 2'-fluoroadenosine-3'-phosphate
  modified_base 14: mod_base = OTHER; note = 2'-O-methyladenosine-3'-phosphate
  modified_base 15: mod_base = OTHER; note = 2'-fluorouridine-3'-phosphate
  modified_base 16: mod_base = OTHER; note = 2'-O-methylguanosine-3'-phosphate
  modified_base 17: mod_base = OTHER; note = 2'-fluorocytidine-3'-phosphorothioate
  modified_base 18: mod_base = OTHER; note = 2'-O-methyluridine-3'-phosphorothioate
  modified_base 19: mod_base = OTHER; note = 2'-fluorouridine
cttgtagccgggaatgctt

SEQ ID NO: 813 - RNA, 19 nt, synthetic construct
  source 1..19: mol_type = other RNA
  modified_base 1: mod_base = OTHER; note = 2'-fluorouridine-3'-phosphorothioate
  modified_base 2: mod_base = OTHER; note = 2'-O-methyladenosine-3'-phosphorothioate
  modified_base 3: mod_base = OTHER; note = 2'-fluoroguanosine-3'-phosphate
  modified_base 4: mod_base = OTHER; note = 2'-O-methylcytidine-3'-phosphate
  modified_base 5: mod_base = OTHER; note = 2'-fluorocytidine-3'-phosphate
  modified_base 6: mod_base = OTHER; note = 2'-O-methylguanosine-3'-phosphate
  modified_base 7: mod_base = OTHER; note = 2'-fluoroguanosine-3'-phosphate
  modified_base 8: mod_base = OTHER; note = 2'-O-methylguanosine-3'-phosphate
  modified_base 9: mod_base = OTHER; note = 2'-fluoroadenosine-3'-phosphate
  modified_base 10: mod_base = OTHER; note = 2'-O-methyladenosine-3'-phosphate
  modified_base 11: mod_base = OTHER; note = 2'-fluorouridine-3'-phosphate
  modified_base 12: mod_base = OTHER; note = 2'-O-methylguanosine-3'-phosphate
  modified_base 13: mod_base = OTHER; note = 2'-fluorocytidine-3'-phosphate
  modified_base 14: mod_base = OTHER; note = 2'-O-methyluridine-3'-phosphate
  modified_base 15: mod_base = OTHER; note = 2'-fluoroguanosine-3'-phosphate
  modified_base 16: mod_base = OTHER; note = 2'-O-methylcytidine-3'-phosphate
  modified_base 17: mod_base = OTHER; note = 2'-fluorouridine-3'-phosphorothioate
  modified_base 18: mod_base = OTHER; note = 2'-O-methylguanosine-3'-phosphorothioate
  modified_base 19: mod_base = OTHER; note = 2'-fluorouridine
tagccgggaatgctgctgt

SEQ ID NO: 814 - RNA, 19 nt, synthetic construct
  source 1..19: mol_type = other RNA
  modified_base 1: mod_base = OTHER; note = 2'-fluorouridine-3'-phosphorothioate
  modified_base 2: mod_base = OTHER; note = 2'-O-methyluridine-3'-phosphorothioate
  modified_base 3: mod_base = OTHER; note = 2'-fluorocytidine-3'-phosphate
  modified_base 4: mod_base = OTHER; note = 2'-O-methyluridine-3'-phosphate
  modified_base 5: mod_base = OTHER; note = 2'-fluorouridine-3'-phosphate
  modified_base 6: mod_base = OTHER; note = 2'-O-methyluridine-3'-phosphate
  modified_base 7: mod_base = OTHER; note = 2'-fluorocytidine-3'-phosphate
  modified_base 8: mod_base = OTHER; note = 2'-O-methylguanosine-3'-phosphate
  modified_base 9: mod_base = OTHER; note = 2'-fluoroguanosine-3'-phosphate
  modified_base 10: mod_base = OTHER; note = 2'-O-methylcytidine-3'-phosphate
  modified_base 11: mod_base = OTHER; note = 2'-fluorocytidine-3'-phosphate
  modified_base 12: mod_base = OTHER; note = 2'-O-methyladenosine-3'-phosphate
  modified_base 13: mod_base = OTHER; note = 2'-fluoroguanosine-3'-phosphate
  modified_base 14: mod_base = OTHER; note = 2'-O-methylguanosine-3'-phosphate
  modified_base 15: mod_base = OTHER; note = 2'-fluorocytidine-3'-phosphate
  modified_base 16: mod_base = OTHER; note = 2'-O-methyluridine-3'-phosphate
  modified_base 17: mod_base = OTHER; note = 2'-fluoroguanosine-3'-phosphorothioate
  modified_base 18: mod_base = OTHER; note = 2'-O-methyladenosine-3'-phosphorothioate
  modified_base 19: mod_base = OTHER; note = 2'-fluoroadenosine
ttctttcggccaggctgaa

SEQ ID NO: 815 - RNA, 19 nt, synthetic construct
  source 1..19: mol_type = other RNA
  modified_base 1: mod_base = OTHER; note = 2'-fluorocytidine-3'-phosphorothioate
  modified_base 2: mod_base = OTHER; note = 2'-O-methyluridine-3'-phosphorothioate
  modified_base 3: mod_base = OTHER; note = 2'-fluoroguanosine-3'-phosphate
  modified_base 4: mod_base = OTHER; note = 2'-O-methyladenosine-3'-phosphate
  modified_base 5: mod_base = OTHER; note = 2'-fluoroguanosine-3'-phosphate
  modified_base 6: mod_base = OTHER; note = 2'-O-methylguanosine-3'-phosphate
  modified_base 7: mod_base = OTHER; note = 2'-fluorocytidine-3'-phosphate
  modified_base 8: mod_base = OTHER; note = 2'-O-methylcytidine-3'-phosphate
  modified_base 9: mod_base = OTHER; note = 2'-fluorocytidine-3'-phosphate
  modified_base 10: mod_base = OTHER; note = 2'-O-methyluridine-3'-phosphate
  modified_base 11: mod_base = OTHER; note = 2'-fluoroguanosine-3'-phosphate
  modified_base 12: mod_base = OTHER; note = 2'-O-methyladenosine-3'-phosphate
  modified_base 13: mod_base = OTHER; note = 2'-fluorocytidine-3'-phosphate
  modified_base 14: mod_base = OTHER; note = 2'-O-methylguanosine-3'-phosphate
  modified_base 15: mod_base = OTHER; note = 2'-fluorouridine-3'-phosphate
  modified_base 16: mod_base = OTHER; note = 2'-O-methylguanosine-3'-phosphate
  modified_base 17: mod_base = OTHER; note = 2'-fluoroguanosine-3'-phosphorothioate
  modified_base 18: mod_base = OTHER; note = 2'-O-methyladenosine-3'-phosphorothioate
  modified_base 19: mod_base = OTHER; note = 2'-fluorouridine
ctgaggccctgacgtggat

SEQ ID NO: 816 - RNA, 19 nt, synthetic construct
  source 1..19: mol_type = other RNA
  modified_base 1: mod_base = OTHER; note = 2'-fluorouridine-3'-phosphorothioate
  modified_base 2: mod_base = OTHER; note = 2'-O-methylguanosine-3'-phosphorothioate
  modified_base 3: mod_base = OTHER; note = 2'-fluoroadenosine-3'-phosphate
  modified_base 4: mod_base = OTHER; note = 2'-O-methylguanosine-3'-phosphate
  modified_base 5: mod_base = OTHER; note = 2'-fluoroguanosine-3'-phosphate
  modified_base 6: mod_base = OTHER; note = 2'-O-methylcytidine-3'-phosphate
  modified_base 7: mod_base = OTHER; note = 2'-fluorocytidine-3'-phosphate
  modified_base 8: mod_base = OTHER; note = 2'-O-methylcytidine-3'-phosphate
  modified_base 9: mod_base = OTHER; note = 2'-fluorouridine-3'-phosphate
  modified_base 10: mod_base = OTHER; note = 2'-O-methylguanosine-3'-phosphate
  modified_base 11: mod_base = OTHER; note = 2'-fluoroadenosine-3'-phosphate
  modified_base 12: mod_base = OTHER; note = 2'-O-methylcytidine-3'-phosphate
  modified_base 13: mod_base = OTHER; note = 2'-fluoroguanosine-3'-phosphate
  modified_base 14: mod_base = OTHER; note = 2'-O-methyluridine-3'-phosphate
  modified_base 15: mod_base = OTHER; note = 2'-fluoroguanosine-3'-phosphate
  modified_base 16: mod_base = OTHER; note = 2'-O-methylguanosine-3'-phosphate
  modified_base 17: mod_base = OTHER; note = 2'-fluoroadenosine-3'-phosphorothioate
  modified_base 18: mod_base = OTHER; note = 2'-O-methyluridine-3'-phosphorothioate
  modified_base 19: mod_base = OTHER; note = 2'-fluorouridine
tgaggccctgacgtggatt

SEQ ID NO: 817 - RNA, 19 nt, synthetic construct
  source 1..19: mol_type = other RNA
  modified_base 1: mod_base = OTHER; note = 2'-fluorocytidine-3'-phosphorothioate
  modified_base 2: mod_base = OTHER; note = 2'-O-methylcytidine-3'-phosphorothioate
  modified_base 3: mod_base = OTHER; note = 2'-fluorocytidine-3'-phosphate
  modified_base 4: mod_base = OTHER; note = 2'-O-methyluridine-3'-phosphate
  modified_base 5: mod_base = OTHER; note = 2'-fluoroguanosine-3'-phosphate
  modified_base 6: mod_base = OTHER; note = 2'-O-methyladenosine-3'-phosphate
  modified_base 7: mod_base = OTHER; note = 2'-fluorocytidine-3'-phosphate
  modified_base 8: mod_base = OTHER; note = 2'-O-methylguanosine-3'-phosphate
  modified_base 9: mod_base = OTHER; note = 2'-fluorouridine-3'-phosphate
  modified_base 10: mod_base = OTHER; note = 2'-O-methylguanosine-3'-phosphate
  modified_base 11: mod_base = OTHER; note = 2'-fluoroguanosine-3'-phosphate
  modified_base 12: mod_base = OTHER; note = 2'-O-methyladenosine-3'-phosphate
  modified_base 13: mod_base = OTHER; note = 2'-fluorouridine-3'-phosphate
  modified_base 14: mod_base = OTHER; note = 2'-O-methylguanosine-3'-phosphate
  modified_base 15: mod_base = OTHER; note = 2'-fluoroguanosine-3'-phosphate
  modified_base 16: mod_base = OTHER; note = 2'-O-methylguanosine-3'-phosphate
  modified_base 17: mod_base = OTHER; note = 2'-fluorocytidine-3'-phosphorothioate
  modified_base 18: mod_base = OTHER; note = 2'-O-methyladenosine-3'-phosphorothioate
  modified_base 19: mod_base = OTHER; note = 2'-fluoroadenosine
ccctgacgtggatgggcaa

SEQ ID NO: 818 - RNA, 19 nt, synthetic construct
  source 1..19: mol_type = other RNA
  modified_base 1: mod_base = OTHER; note = 2'-fluorocytidine-3'-phosphorothioate
  modified_base 2: mod_base = OTHER; note = 2'-O-methylcytidine-3'-phosphorothioate
  modified_base 3: mod_base = OTHER; note = 2'-fluorouridine-3'-phosphate
  modified_base 4: mod_base = OTHER; note = 2'-O-methylguanosine-3'-phosphate
  modified_base 5: mod_base = OTHER; note = 2'-fluoroadenosine-3'-phosphate
  modified_base 6: mod_base = OTHER; note = 2'-O-methylcytidine-3'-phosphate
  modified_base 7: mod_base = OTHER; note = 2'-fluoroguanosine-3'-phosphate
  modified_base 8: mod_base = OTHER; note = 2'-O-methyluridine-3'-phosphate
  modified_base 9: mod_base = OTHER; note = 2'-fluoroguanosine-3'-phosphate
  modified_base 10: mod_base = OTHER; note = 2'-O-methylguanosine-3'-phosphate
  modified_base 11: mod_base = OTHER; note = 2'-fluoroadenosine-3'-phosphate
  modified_base 12: mod_base = OTHER; note = 2'-O-methyluridine-3'-phosphate
  modified_base 13: mod_base = OTHER; note = 2'-fluoroguanosine-3'-phosphate
  modified_base 14: mod_base = OTHER; note = 2'-O-methylguanosine-3'-phosphate
  modified_base 15: mod_base = OTHER; note = 2'-fluoroguanosine-3'-phosphate
  modified_base 16: mod_base = OTHER; note = 2'-O-methylcytidine-3'-phosphate
  modified_base 17: mod_base = OTHER; note = 2'-fluoroadenosine-3'-phosphorothioate
  modified_base 18: mod_base = OTHER; note = 2'-O-methyladenosine-3'-phosphorothioate
  modified_base 19: mod_base = OTHER; note = 2'-fluoroadenosine
cctgacgtggatgggcaaa

SEQ ID NO: 819 - RNA, 19 nt, synthetic construct
  source 1..19: mol_type = other RNA
  modified_base 1: mod_base = OTHER; note = 2'-fluorocytidine-3'-phosphorothioate
  modified_base 2: mod_base = OTHER; note = 2'-O-methyluridine-3'-phosphorothioate
  modified_base 3: mod_base = OTHER; note = 2'-fluoroguanosine-3'-phosphate
  modified_base 4: mod_base = OTHER; note = 2'-O-methyladenosine-3'-phosphate
  modified_base 5: mod_base = OTHER; note = 2'-fluorocytidine-3'-phosphate
  modified_base 6: mod_base = OTHER; note = 2'-O-methylguanosine-3'-phosphate
  modified_base 7: mod_base = OTHER; note = 2'-fluorouridine-3'-phosphate
  modified_base 8: mod_base = OTHER; note = 2'-O-methylguanosine-3'-phosphate
  modified_base 9: mod_base = OTHER; note = 2'-fluoroguanosine-3'-phosphate
  modified_base 10: mod_base = OTHER; note = 2'-O-methyladenosine-3'-phosphate
  modified_base 11: mod_base = OTHER; note = 2'-fluorouridine-3'-phosphate
  modified_base 12: mod_base = OTHER; note = 2'-O-methylguanosine-3'-phosphate
  modified_base 13: mod_base = OTHER; note = 2'-fluoroguanosine-3'-phosphate
  modified_base 14: mod_base = OTHER; note = 2'-O-methylguanosine-3'-phosphate
  modified_base 15: mod_base = OTHER; note = 2'-fluorocytidine-3'-phosphate
  modified_base 16: mod_base = OTHER; note = 2'-O-methyladenosine-3'-phosphate
  modified_base 17: mod_base = OTHER; note = 2'-fluoroadenosine-3'-phosphorothioate
  modified_base 18: mod_base = OTHER; note = 2'-O-methyladenosine-3'-phosphorothioate
  modified_base 19: mod_base = OTHER; note = 2'-fluorouridine
ctgacgtggatgggcaaat

SEQ ID NO: 820 - RNA, 19 nt, synthetic construct
  source 1..19: mol_type = other RNA
  modified_base 1: mod_base = OTHER; note = 2'-fluorouridine-3'-phosphorothioate
  modified_base 2: mod_base = OTHER; note = 2'-O-methylguanosine-3'-phosphorothioate
  modified_base 3: mod_base = OTHER; note = 2'-fluorouridine-3'-phosphate
  modified_base 4: mod_base = OTHER; note = 2'-O-methylguanosine-3'-phosphate
  modified_base 5: mod_base = OTHER; note = 2'-fluorocytidine-3'-phosphate
  modified_base 6: mod_base = OTHER; note = 2'-O-methyladenosine-3'-phosphate
  modified_base 7: mod_base = OTHER; note = 2'-fluorouridine-3'-phosphate
  modified_base 8: mod_base = OTHER; note = 2'-O-methylguanosine-3'-phosphate
  modified_base 9: mod_base = OTHER; note = 2'-fluoroadenosine-3'-phosphate
  modified_base 10: mod_base = OTHER; note = 2'-O-methylcytidine-3'-phosphate
  modified_base 11: mod_base = OTHER; note = 2'-fluoroguanosine-3'-phosphate
  modified_base 12: mod_base = OTHER; note = 2'-O-methylcytidine-3'-phosphate
  modified_base 13: mod_base = OTHER; note = 2'-fluorocytidine-3'-phosphate
  modified_base 14: mod_base = OTHER; note = 2'-O-methylcytidine-3'-phosphate
  modified_base 15: mod_base = OTHER; note = 2'-fluorouridine-3'-phosphate
  modified_base 16: mod_base = OTHER; note = 2'-O-methylguanosine-3'-phosphate
  modified_base 17: mod_base = OTHER; note = 2'-fluorocytidine-3'-phosphorothioate
  modified_base 18: mod_base = OTHER; note = 2'-O-methyluridine-3'-phosphorothioate
  modified_base 19: mod_base = OTHER; note = 2'-fluorocytidine
tgtgcatgacgccctgctc

SEQ ID NO: 821 - RNA, 19 nt, synthetic construct
  source 1..19: mol_type = other RNA
  modified_base 1: mod_base = OTHER; note = 2'-fluoroguanosine-3'-phosphorothioate
  modified_base 2: mod_base = OTHER; note = 2'-O-methyluridine-3'-phosphorothioate
  modified_base 3: mod_base = OTHER; note = 2'-fluoroguanosine-3'-phosphate
  modified_base 4: mod_base = OTHER; note = 2'-O-methylcytidine-3'-phosphate
  modified_base 5: mod_base = OTHER; note = 2'-fluoroadenosine-3'-phosphate
  modified_base 6: mod_base = OTHER; note = 2'-O-methyluridine-3'-phosphate
  modified_base 7: mod_base = OTHER; note = 2'-fluoroguanosine-3'-phosphate
  modified_base 8: mod_base = OTHER; note = 2'-O-methyladenosine-3'-phosphate
  modified_base 9: mod_base = OTHER; note = 2'-fluorocytidine-3'-phosphate
  modified_base 10: mod_base = OTHER; note = 2'-O-methylguanosine-3'-phosphate
  modified_base 11: mod_base = OTHER; note = 2'-fluorocytidine-3'-phosphate
  modified_base 12: mod_base = OTHER; note = 2'-O-methylcytidine-3'-phosphate
  modified_base 13: mod_base = OTHER; note = 2'-fluorocytidine-3'-phosphate
  modified_base 14: mod_base = OTHER; note = 2'-O-methyluridine-3'-phosphate
  modified_base 15: mod_base = OTHER; note = 2'-fluoroguanosine-3'-phosphate
  modified_base 16: mod_base = OTHER; note = 2'-O-methylcytidine-3'-phosphate
  modified_base 17: mod_base = OTHER; note = 2'-fluorouridine-3'-phosphorothioate
  modified_base 18: mod_base = OTHER; note = 2'-O-methylcytidine-3'-phosphorothioate
  modified_base 19: mod_base = OTHER; note = 2'-fluorouridine
gtgcatgacgccctgctct

SEQ ID NO: 822 - RNA, 19 nt, synthetic construct
  source 1..19: mol_type = other RNA
  modified_base 1: mod_base = OTHER; note = 2'-fluoroguanosine-3'-phosphorothioate
  modified_base 2: mod_base = OTHER; note = 2'-O-methylcytidine-3'-phosphorothioate
  modified_base 3: mod_base = OTHER; note = 2'-fluorouridine-3'-phosphate
  modified_base 4: mod_base = OTHER; note = 2'-O-methyluridine-3'-phosphate
  modified_base 5: mod_base = OTHER; note = 2'-fluoroadenosine-3'-phosphate
  modified_base 6: mod_base = OTHER; note = 2'-O-methylcytidine-3'-phosphate
  modified_base 7: mod_base = OTHER; note = 2'-fluorouridine-3'-phosphate
  modified_base 8: mod_base = OTHER; note = 2'-O-methylcytidine-3'-phosphate
  modified_base 9: mod_base = OTHER; note = 2'-fluoroguanosine-3'-phosphate
  modified_base 10: mod_base = OTHER; note = 2'-O-methylguanosine-3'-phosphate
  modified_base 11: mod_base = OTHER; note = 2'-fluoroguanosine-3'-phosphate
  modified_base 12: mod_base = OTHER; note = 2'-O-methyladenosine-3'-phosphate
  modified_base 13: mod_base = OTHER; note = 2'-fluoroadenosine-3'-phosphate
  modified_base 14: mod_base = OTHER; note = 2'-O-methyladenosine-3'-phosphate
  modified_base 15: mod_base = OTHER; note = 2'-fluorouridine-3'-phosphate
  modified_base 16: mod_base = OTHER; note = 2'-O-methyluridine-3'-phosphate
  modified_base 17: mod_base = OTHER; note = 2'-fluorouridine-3'-phosphorothioate
  modified_base 18: mod_base = OTHER; note = 2'-O-methylguanosine-3'-phosphorothioate
  modified_base 19: mod_base = OTHER; note = 2'-fluoroadenosine
gcttactcgggaaatttga

SEQ ID NO: 823 - RNA, 19 nt, synthetic construct
  source 1..19: mol_type = other RNA
  modified_base 1: mod_base = OTHER; note = 2'-fluorocytidine-3'-phosphorothioate
  modified_base 2: mod_base = OTHER; note = 2'-O-methyluridine-3'-phosphorothioate
  modified_base 3: mod_base = OTHER; note = 2'-fluorouridine-3'-phosphate
  modified_base 4: mod_base = OTHER; note = 2'-O-methyladenosine-3'-phosphate
  modified_base 5: mod_base = OTHER; note = 2'-fluorocytidine-3'-phosphate
  modified_base 6: mod_base = OTHER; note = 2'-O-methyluridine-3'-phosphate
  modified_base 7: mod_base = OTHER; note = 2'-fluorocytidine-3'-phosphate
  modified_base 8: mod_base = OTHER; note = 2'-O-methylguanosine-3'-phosphate
  modified_base 9: mod_base = OTHER; note = 2'-fluoroguanosine-3'-phosphate
  modified_base 10: mod_base = OTHER; note = 2'-O-methylguanosine-3'-phosphate
  modified_base 11: mod_base = OTHER; note = 2'-fluoroadenosine-3'-phosphate
  modified_base 12: mod_base = OTHER; note = 2'-O-methyladenosine-3'-phosphate
  modified_base 13: mod_base = OTHER; note = 2'-fluoroadenosine-3'-phosphate
  modified_base 14: mod_base = OTHER; note = 2'-O-methyluridine-3'-phosphate
  modified_base 15: mod_base = OTHER; note = 2'-fluorouridine-3'-phosphate
  modified_base 16: mod_base = OTHER; note = 2'-O-methyluridine-3'-phosphate
  modified_base 17: mod_base = OTHER; note = 2'-fluoroguanosine-3'-phosphorothioate
  modified_base 18: mod_base = OTHER; note = 2'-O-methylcytidine-3'-phosphorothioate
  modified_base 19: mod_base = OTHER; note = 2'-fluorouridine
cttactcgggaaatttgct

SEQ ID NO: 824 - RNA, 19 nt, synthetic construct
  source 1..19: mol_type = other RNA
  modified_base 1: mod_base = OTHER; note = 2'-fluorouridine-3'-phosphorothioate
  modified_base 2: mod_base = OTHER; note = 2'-O-methyluridine-3'-phosphorothioate
  modified_base 3: mod_base = OTHER; note = 2'-fluoroadenosine-3'-phosphate
  modified_base 4: mod_base = OTHER; note = 2'-O-methylcytidine-3'-phosphate
  modified_base 5: mod_base = OTHER; note = 2'-fluorouridine-3'-phosphate
  modified_base 6: mod_base = OTHER; note = 2'-O-methylcytidine-3'-phosphate
  modified_base 7: mod_base = OTHER; note = 2'-fluoroguanosine-3'-phosphate
  modified_base 8: mod_base = OTHER; note = 2'-O-methylguanosine-3'-phosphate
  modified_base 9: mod_base = OTHER; note = 2'-fluoroguanosine-3'-phosphate
  modified_base 10: mod_base = OTHER; note = 2'-O-methyladenosine-3'-phosphate
  modified_base 11: mod_base = OTHER; note = 2'-fluoroadenosine-3'-phosphate
  modified_base 12: mod_base = OTHER; note = 2'-O-methyladenosine-3'-phosphate
  modified_base 13: mod_base = OTHER; note = 2'-fluorouridine-3'-phosphate
  modified_base 14: mod_base = OTHER; note = 2'-O-methyluridine-3'-phosphate
  modified_base 15: mod_base = OTHER; note = 2'-fluorouridine-3'-phosphate
  modified_base 16: mod_base = OTHER; note = 2'-O-methylguanosine-3'-phosphate
  modified_base 17: mod_base = OTHER; note = 2'-fluorocytidine-3'-phosphorothioate
  modified_base 18: mod_base = OTHER; note = 2'-O-methyluridine-3'-phosphorothioate
  modified_base 19: mod_base = OTHER; note = 2'-fluorouridine
ttactcgggaaatttgctt

SEQ ID NO: 825 - RNA, 19 nt, synthetic construct
  source 1..19: mol_type = other RNA
  modified_base 1: mod_base = OTHER; note = 2'-fluorouridine-3'-phosphorothioate
  modified_base 2: mod_base = OTHER; note = 2'-O-methyladenosine-3'-phosphorothioate
  modified_base 3: mod_base = OTHER; note = 2'-fluorocytidine-3'-phosphate
  modified_base 4: mod_base = OTHER; note = 2'-O-methyluridine-3'-phosphate
  modified_base 5: mod_base = OTHER; note = 2'-fluorocytidine-3'-phosphate
  modified_base 6: mod_base = OTHER; note = 2'-O-methylguanosine-3'-phosphate
  modified_base 7: mod_base = OTHER; note = 2'-fluoroguanosine-3'-phosphate
  modified_base 8: mod_base = OTHER; note = 2'-O-methylguanosine-3'-phosphate
  modified_base 9: mod_base = OTHER; note = 2'-fluoroadenosine-3'-phosphate
  modified_base 10: mod_base = OTHER; note = 2'-O-methyladenosine-3'-phosphate
  modified_base 11: mod_base = OTHER; note = 2'-fluoroadenosine-3'-phosphate
  modified_base 12: mod_base = OTHER; note = 2'-O-methyluridine-3'-phosphate
  modified_base 13: mod_base = OTHER; note = 2'-fluorouridine-3'-phosphate
  modified_base 14: mod_base = OTHER; note = 2'-O-methyluridine-3'-phosphate
  modified_base 15: mod_base = OTHER; note = 2'-fluoroguanosine-3'-phosphate
  modified_base 16: mod_base = OTHER; note = 2'-O-methylcytidine-3'-phosphate
  modified_base 17: mod_base = OTHER; note = 2'-fluorouridine-3'-phosphorothioate
  modified_base 18: mod_base = OTHER; note = 2'-O-methyluridine-3'-phosphorothioate
  modified_base 19: mod_base = OTHER; note = 2'-fluorouridine
tactcgggaaatttgcttt

SEQ ID NO: 826 - RNA, 19 nt, synthetic construct
  source 1..19: mol_type = other RNA
  modified_base 1: mod_base = OTHER; note = 2'-fluoroadenosine-3'-phosphorothioate
  modified_base 2: mod_base = OTHER; note = 2'-O-methylcytidine-3'-phosphorothioate
  modified_base 3: mod_base = OTHER; note = 2'-fluorouridine-3'-phosphate
  modified_base 4: mod_base = OTHER; note = 2'-O-methylcytidine-3'-phosphate
  modified_base 5: mod_base = OTHER; note = 2'-fluoroguanosine-3'-phosphate
  modified_base 6: mod_base = OTHER; note = 2'-O-methylguanosine-3'-phosphate
  modified_base 7: mod_base = OTHER; note = 2'-fluoroguanosine-3'-phosphate
  modified_base 8: mod_base = OTHER; note = 2'-O-methyladenosine-3'-phosphate
  modified_base 9: mod_base = OTHER; note = 2'-fluoroadenosine-3'-phosphate
  modified_base 10: mod_base = OTHER; note = 2'-O-methyladenosine-3'-phosphate
  modified_base 11: mod_base = OTHER; note = 2'-fluorouridine-3'-phosphate
  modified_base 12: mod_base = OTHER; note = 2'-O-methyluridine-3'-phosphate
  modified_base 13: mod_base = OTHER; note = 2'-fluorouridine-3'-phosphate
  modified_base 14: mod_base = OTHER; note = 2'-O-methylguanosine-3'-phosphate
  modified_base 15: mod_base = OTHER; note = 2'-fluorocytidine-3'-phosphate
  modified_base 16: mod_base = OTHER; note = 2'-O-methyluridine-3'-phosphate
  modified_base 17: mod_base = OTHER; note = 2'-fluorouridine-3'-phosphorothioate
  modified_base 18: mod_base = OTHER; note = 2'-O-methyluridine-3'-phosphorothioate
  modified_base 19: mod_base = OTHER; note = 2'-fluorouridine
actcgggaaatttgctttt

SEQ ID NO: 827 - RNA, 19 nt, synthetic construct
  source 1..19: mol_type = other RNA
  modified_base 1: mod_base = OTHER; note = 2'-fluorocytidine-3'-phosphorothioate
  modified_base 2: mod_base = OTHER; note = 2'-O-methyluridine-3'-phosphorothioate
  modified_base 3: mod_base = OTHER; note = 2'-fluorocytidine-3'-phosphate
  modified_base 4: mod_base = OTHER; note = 2'-O-methylguanosine-3'-phosphate
  modified_base 5: mod_base = OTHER; note = 2'-fluoroguanosine-3'-phosphate
  modified_base 6: mod_base = OTHER; note = 2'-O-methylguanosine-3'-phosphate
  modified_base 7: mod_base = OTHER; note = 2'-fluoroadenosine-3'-phosphate
  modified_base 8: mod_base = OTHER; note = 2'-O-methyladenosine-3'-phosphate
  modified_base 9: mod_base = OTHER; note = 2'-fluoroadenosine-3'-phosphate
  modified_base 10: mod_base = OTHER; note = 2'-O-methyluridine-3'-phosphate
  modified_base 11: mod_base = OTHER; note = 2'-fluorouridine-3'-phosphate
  modified_base 12: mod_base = OTHER; note = 2'-O-methyluridine-3'-phosphate
  modified_base 13: mod_base = OTHER; note = 2'-fluoroguanosine-3'-phosphate
  modified_base 14: mod_base = OTHER; note = 2'-O-methylcytidine-3'-phosphate
  modified_base 15: mod_base = OTHER; note = 2'-fluorouridine-3'-phosphate
  modified_base 16: mod_base = OTHER; note = 2'-O-methyluridine-3'-phosphate
  modified_base 17: mod_base = OTHER; note = 2'-fluorouridine-3'-phosphorothioate
  modified_base 18: mod_base = OTHER; note = 2'-O-methyluridine-3'-phosphorothioate
  modified_base 19: mod_base = OTHER; note = 2'-fluoroadenosine
ctcgggaaatttgctttta

SEQ ID NO: 828 - RNA, 19 nt, synthetic construct
  source 1..19: mol_type = other RNA
  modified_base 1: mod_base = OTHER; note = 2'-fluorouridine-3'-phosphorothioate
  modified_base 2: mod_base = OTHER; note = 2'-O-methylcytidine-3'-phosphorothioate
  modified_base 3: mod_base = OTHER; note = 2'-fluoroguanosine-3'-phosphate
  modified_base 4: mod_base = OTHER; note = 2'-O-methylguanosine-3'-phosphate
  modified_base 5: mod_base = OTHER; note = 2'-fluoroguanosine-3'-phosphate
  modified_base 6: mod_base = OTHER; note = 2'-O-methyladenosine-3'-phosphate
  modified_base 7: mod_base = OTHER; note = 2'-fluoroadenosine-3'-phosphate
  modified_base 8: mod_base = OTHER; note = 2'-O-methyladenosine-3'-phosphate
  modified_base 9: mod_base = OTHER; note = 2'-fluorouridine-3'-phosphate
  modified_base 10: mod_base = OTHER; note = 2'-O-methyluridine-3'-phosphate
  modified_base 11: mod_base = OTHER; note = 2'-fluorouridine-3'-phosphate
  modified_base 12: mod_base = OTHER; note = 2'-O-methylguanosine-3'-phosphate
  modified_base 13: mod_base = OTHER; note = 2'-fluorocytidine-3'-phosphate
  modified_base 14: mod_base = OTHER; note = 2'-O-methyluridine-3'-phosphate
  modified_base 15: mod_base = OTHER; note = 2'-fluorouridine-3'-phosphate
  modified_base 16: mod_base = OTHER; note = 2'-O-methyluridine-3'-phosphate
  modified_base 17: mod_base = OTHER; note = 2'-fluorouridine-3'-phosphorothioate
  modified_base 18: mod_base = OTHER; note = 2'-O-methylguanosine-3'-phosphorothioate
  modified_base 19: mod_base = OTHER; note = 2'-fluorouridine
tcgggaaatttgcttttgt

SEQ ID NO: 829 - RNA, 19 nt, synthetic construct
  source 1..19: mol_type = other RNA
  modified_base 1: mod_base = OTHER; note = 2'-fluoroguanosine-3'-phosphorothioate
  modified_base 2: mod_base = OTHER; note = 2'-O-methylguanosine-3'-phosphorothioate
  modified_base 3: mod_base = OTHER; note = 2'-fluoroadenosine-3'-phosphate
  modified_base 4: mod_base = OTHER; note = 2'-O-methyladenosine-3'-phosphate
  modified_base 5: mod_base = OTHER; note = 2'-fluoroadenosine-3'-phosphate
  modified_base 6: mod_base = OTHER; note = 2'-O-methyluridine-3'-phosphate
  modified_base 7: mod_base = OTHER; note = 2'-fluorouridine-3'-phosphate
  modified_base 8: mod_base = OTHER; note = 2'-O-methyluridine-3'-phosphate
  modified_base 9: mod_base = OTHER; note = 2'-fluoroguanosine-3'-phosphate
  modified_base 10: mod_base = OTHER; note = 2'-O-methylcytidine-3'-phosphate
  modified_base 11: mod_base = OTHER; note = 2'-fluorouridine-3'-phosphate
  modified_base 12: mod_base = OTHER; note = 2'-O-methyluridine-3'-phosphate
  modified_base 13: mod_base = OTHER; note = 2'-fluorouridine-3'-phosphate
  modified_base 14: mod_base = OTHER; note = 2'-O-methyluridine-3'-phosphate
  modified_base 15: mod_base = OTHER; note = 2'-fluoroguanosine-3'-phosphate
  modified_base 16: mod_base = OTHER; note = 2'-O-methylcytidine-3'-phosphate
  modified_base 17: mod_base = OTHER; note = 2'-fluorocytidine-3'-phosphorothioate
  modified_base 18: mod_base = OTHER; note = 2'-O-methyladenosine-3'-phosphorothioate
  modified_base 19: mod_base = OTHER; note = 2'-fluoroadenosine
ggaaatttgcttttgccaa

SEQ ID NO: 830 - RNA, 19 nt, synthetic construct
  source 1..19: mol_type = other RNA
  modified_base 1: mod_base = OTHER; note = 2'-fluoroguanosine-3'-phosphorothioate
  modified_base 2: mod_base = OTHER; note = 2'-O-methyladenosine-3'-phosphorothioate
  modified_base 3: mod_base = OTHER; note = 2'-fluoroadenosine-3'-phosphate
  modified_base 4: mod_base = OTHER; note = 2'-O-methyladenosine-3'-phosphate
  modified_base 5: mod_base = OTHER; note = 2'-fluorouridine-3'-phosphate
  modified_base 6: mod_base = OTHER; note = 2'-O-methyluridine-3'-phosphate
  modified_base 7: mod_base = OTHER; note = 2'-fluorouridine-3'-phosphate
  modified_base 8: mod_base = OTHER; note = 2'-O-methylguanosine-3'-phosphate
  modified_base 9: mod_base = OTHER; note = 2'-fluorocytidine-3'-phosphate
  modified_base 10: mod_base = OTHER; note = 2'-O-methyluridine-3'-phosphate
  modified_base 11: mod_base = OTHER; note = 2'-fluorouridine-3'-phosphate
  modified_base 12: mod_base = OTHER; note = 2'-O-methyluridine-3'-phosphate
  modified_base 13: mod_base = OTHER; note = 2'-fluorouridine-3'-phosphate
  modified_base 14: mod_base = OTHER; note = 2'-O-methylguanosine-3'-phosphate
  modified_base 15: mod_base = OTHER; note = 2'-fluorocytidine-3'-phosphate
  modified_base 16: mod_base = OTHER; note = 2'-O-methylcytidine-3'-phosphate
  modified_base 17: mod_base = OTHER; note = 2'-fluoroadenosine-3'-phosphorothioate
  modified_base 18: mod_base = OTHER; note = 2'-O-methyladenosine-3'-phosphorothioate
  modified_base 19: mod_base = OTHER; note = 2'-fluoroadenosine
gaaatttgcttttgccaaa

SEQ ID NO: 831 - RNA, 19 nt, synthetic construct
  source 1..19: mol_type = other RNA
  modified_base 1: mod_base = OTHER; note = 2'-fluoroadenosine-3'-phosphorothioate
  modified_base 2: mod_base = OTHER; note = 2'-O-methyladenosine-3'-phosphorothioate
  modified_base 3: mod_base = OTHER; note = 2'-fluoroadenosine-3'-phosphate
  modified_base 4: mod_base = OTHER; note = 2'-O-methyluridine-3'-phosphate
  modified_base 5: mod_base = OTHER; note = 2'-fluorouridine-3'-phosphate
  modified_base 6: mod_base = OTHER; note = 2'-O-methyluridine-3'-phosphate
  modified_base 7: mod_base = OTHER; note = 2'-fluoroguanosine-3'-phosphate
  modified_base 8: mod_base = OTHER; note = 2'-O-methylcytidine-3'-phosphate
  modified_base 9: mod_base = OTHER; note = 2'-fluorouridine-3'-phosphate
  modified_base 10: mod_base = OTHER; note = 2'-O-methyluridine-3'-phosphate
  modified_base 11: mod_base = OTHER; note = 2'-fluorouridine-3'-phosphate
  modified_base 12: mod_base = OTHER; note = 2'-O-methyluridine-3'-phosphate
  modified_base 13: mod_base = OTHER; note = 2'-fluoroguanosine-3'-phosphate
  modified_base 14: mod_base = OTHER; note = 2'-O-methylcytidine-3'-phosphate
  modified_base 15: mod_base = OTHER; note = 2'-fluorocytidine-3'-phosphate
  modified_base 16: mod_base = OTHER; note = 2'-O-methyladenosine-3'-phosphate
  modified_base 17: mod_base = OTHER; note = 2'-fluoroadenosine-3'-phosphorothioate
  modified_base 18: mod_base = OTHER; note = 2'-O-methyladenosine-3'-phosphorothioate
  modified_base 19: mod_base = OTHER; note = 2'-fluorouridine
aaatttgcttttgccaaat

SEQ ID NO: 832 - RNA, 19 nt, synthetic construct
  source 1..19: mol_type = other RNA
  modified_base 1: mod_base = OTHER; note = 2'-fluoroguanosine-3'-phosphorothioate
  modified_base 2: mod_base = OTHER; note = 2'-O-methylcytidine-3'-phosphorothioate
  modified_base 3: mod_base = OTHER; note = 2'-fluorouridine-3'-phosphate
  modified_base 4: mod_base = OTHER; note = 2'-O-methyluridine-3'-phosphate
  modified_base 5: mod_base = OTHER; note = 2'-fluorouridine-3'-phosphate
  modified_base 6: mod_base = OTHER; note = 2'-O-methyluridine-3'-phosphate
  modified_base 7: mod_base = OTHER; note = 2'-fluoroguanosine-3'-phosphate
  modified_base 8: mod_base = OTHER; note = 2'-O-methylcytidine-3'-phosphate
  modified_base 9: mod_base = OTHER; note = 2'-fluorocytidine-3'-phosphate
  modified_base 10: mod_base = OTHER; note = 2'-O-methyladenosine-3'-phosphate
  modified_base 11: mod_base = OTHER; note = 2'-fluoroadenosine-3'-phosphate
  modified_base 12: mod_base = OTHER; note = 2'-O-methyladenosine-3'-phosphate
  modified_base 13: mod_base = OTHER; note = 2'-fluorocytidine-3'-phosphate
  modified_base 14: mod_base = OTHER; note = 2'-O-methylcytidine-3'-phosphate
  modified_base 15: mod_base = OTHER; note = 2'-fluorocytidine-3'-phosphate
  modified_base 16: mod_base = OTHER; note = 2'-O-methylguanosine-3'-phosphate
  modified_base 17: mod_base = OTHER; note = 2'-fluorocytidine-3'-phosphorothioate
  modified_base 18: mod_base = OTHER; note = 2'-O-methyluridine-3'-phosphorothioate
  modified_base 19: mod_base = OTHER; note = 2'-fluorouridine
gcttttgccaaacccgctt

SEQ ID NO: 833 - RNA, 19 nt, synthetic construct
  source 1..19: mol_type = other RNA
  modified_base 1: mod_base = OTHER; note = 2'-fluoroguanosine-3'-phosphorothioate
  modified_base 2: mod_base = OTHER; note = 2'-O-methylcytidine-3'-phosphorothioate
  modified_base 3: mod_base = OTHER; note = 2'-fluorouridine-3'-phosphate
  modified_base 4: mod_base = OTHER; note = 2'-O-methyluridine-3'-phosphate
  modified_base 5: mod_base = OTHER; note = 2'-fluorocytidine-3'-phosphate
  modified_base 6: mod_base = OTHER; note = 2'-O-methylguanosine-3'-phosphate
  modified_base 7: mod_base = OTHER; note = 2'-fluoroguanosine-3'-phosphate
  modified_base 8: mod_base = OTHER; note = 2'-O-methylcytidine-3'-phosphate
  modified_base 9: mod_base = OTHER; note = 2'-fluoroguanosine-3'-phosphate
  modified_base 10: mod_base = OTHER; note = 2'-O-methylguanosine-3'-phosphate
  modified_base 11: mod_base = OTHER; note = 2'-fluorouridine-3'-phosphate
  modified_base 12: mod_base = OTHER; note = 2'-O-methyluridine-3'-phosphate
  modified_base 13: mod_base = OTHER; note = 2'-fluorouridine-3'-phosphate
  modified_base 14: mod_base = OTHER; note = 2'-O-methylguanosine-3'-phosphate
  modified_base 15: mod_base = OTHER; note = 2'-fluoroguanosine-3'-phosphate
  modified_base 16: mod_base = OTHER; note = 2'-O-methyladenosine-3'-phosphate
  modified_base 17: mod_base = OTHER; note = 2'-fluorouridine-3'-phosphorothioate
  modified_base 18: mod_base = OTHER; note = 2'-O-methyladenosine-3'-phosphorothioate
  modified_base 19: mod_base = OTHER; note = 2'-fluorouridine
gcttcggcggtttggatat

SEQ ID NO: 834 - RNA, 19 nt, synthetic construct
  source 1..19: mol_type = other RNA
  modified_base 1: mod_base = OTHER; note = 2'-fluorocytidine-3'-phosphorothioate
  modified_base 2: mod_base = OTHER; note = 2'-O-methyluridine-3'-phosphorothioate
  modified_base 3: mod_base = OTHER; note = 2'-fluorouridine-3'-phosphate
  modified_base 4: mod_base = OTHER; note = 2'-O-methylcytidine-3'-phosphate
  modified_base 5: mod_base = OTHER; note = 2'-fluoroguanosine-3'-phosphate
  modified_base 6: mod_base = OTHER; note = 2'-O-methylguanosine-3'-phosphate
  modified_base 7: mod_base = OTHER; note = 2'-fluorocytidine-3'-phosphate
  modified_base 8: mod_base = OTHER; note = 2'-O-methylguanosine-3'-phosphate
  modified_base 9: mod_base = OTHER; note = 2'-fluoroguanosine-3'-phosphate
  modified_base 10: mod_base = OTHER; note = 2'-O-methyluridine-3'-phosphate
  modified_base 11: mod_base = OTHER; note = 2'-fluorouridine-3'-phosphate
  modified_base 12: mod_base = OTHER; note = 2'-O-methyluridine-3'-phosphate
  modified_base 13: mod_base = OTHER; note = 2'-fluoroguanosine-3'-phosphate
  modified_base 14: mod_base = OTHER; note = 2'-O-methylguanosine-3'-phosphate
  modified_base 15: mod_base = OTHER; note = 2'-fluoroadenosine-3'-phosphate
  modified_base 16: mod_base = OTHER; note = 2'-O-methyluridine-3'-phosphate
  modified_base 17: mod_base = OTHER; note = 2'-fluoroadenosine-3'-phosphorothioate
  modified_base 18: mod_base = OTHER; note = 2'-O-methyluridine-3'-phosphorothioate
  modified_base 19: mod_base = OTHER; note = 2'-fluorouridine
cttcggcggtttggatatt

SEQ ID NO: 835 - RNA, 19 nt, synthetic construct
  source 1..19: mol_type = other RNA
  modified_base 1: mod_base = OTHER; note = 2'-fluorouridine-3'-phosphorothioate
  modified_base 2: mod_base = OTHER; note = 2'-O-methyluridine-3'-phosphorothioate
  modified_base 3: mod_base = OTHER; note = 2'-fluorocytidine-3'-phosphate
  modified_base 4: mod_base = OTHER; note = 2'-O-methylguanosine-3'-phosphate
  modified_base 5: mod_base = OTHER; note = 2'-fluoroguanosine-3'-phosphate
  modified_base 6: mod_base = OTHER; note = 2'-O-methylcytidine-3'-phosphate
  modified_base 7: mod_base = OTHER; note = 2'-fluoroguanosine-3'-phosphate
  modified_base 8: mod_base = OTHER; note = 2'-O-methylguanosine-3'-phosphate
  modified_base 9: mod_base = OTHER; note = 2'-fluorouridine-3'-phosphate
  modified_base 10: mod_base = OTHER; note = 2'-O-methyluridine-3'-phosphate
  modified_base 11: mod_base = OTHER; note = 2'-fluorouridine-3'-phosphate
  modified_base 12: mod_base = OTHER; note = 2'-O-methylguanosine-3'-phosphate
  modified_base 13: mod_base = OTHER; note = 2'-fluoroguanosine-3'-phosphate
  modified_base 14: mod_base = OTHER; note = 2'-O-methyladenosine-3'-phosphate
  modified_base 15: mod_base = OTHER; note = 2'-fluorouridine-3'-phosphate
  modified_base 16: mod_base = OTHER; note = 2'-O-methyladenosine-3'-phosphate
  modified_base 17: mod_base = OTHER; note = 2'-fluorouridine-3'-phosphorothioate
  modified_base 18: mod_base = OTHER; note = 2'-O-methyluridine-3'-phosphorothioate
  modified_base 19: mod_base = OTHER; note = 2'-fluorouridine
ttcggcggtttggatattt

SEQ ID NO: 836 - RNA, 19 nt, synthetic construct
  source 1..19: mol_type = other RNA
  modified_base 1: mod_base = OTHER; note = 2'-fluorouridine-3'-phosphorothioate
  modified_base 2: mod_base = OTHER; note = 2'-O-methylcytidine-3'-phosphorothioate
  modified_base 3: mod_base = OTHER; note = 2'-fluoroguanosine-3'-phosphate
  modified_base 4: mod_base = OTHER; note = 2'-O-methylguanosine-3'-phosphate
  modified_base 5: mod_base = OTHER; note = 2'-fluorocytidine-3'-phosphate
  modified_base 6: mod_base = OTHER; note = 2'-O-methylguanosine-3'-phosphate
  modified_base 7: mod_base = OTHER; note = 2'-fluoroguanosine-3'-phosphate
  modified_base 8: mod_base = OTHER; note = 2'-O-methyluridine-3'-phosphate
  modified_base 9: mod_base = OTHER; note = 2'-fluorouridine-3'-phosphate
  modified_base 10: mod_base = OTHER; note = 2'-O-methyluridine-3'-phosphate
  modified_base 11: mod_base = OTHER; note = 2'-fluoroguanosine-3'-phosphate
  modified_base 12: mod_base = OTHER; note = 2'-O-methylguanosine-3'-phosphate
  modified_base 13: mod_base = OTHER; note = 2'-fluoroadenosine-3'-phosphate
  modified_base 14: mod_base = OTHER; note = 2'-O-methyluridine-3'-phosphate
  modified_base 15: mod_base = OTHER; note = 2'-fluoroadenosine-3'-phosphate
  modified_base 16: mod_base = OTHER; note = 2'-O-methyluridine-3'-phosphate
  modified_base 17: mod_base = OTHER; note = 2'-fluorouridine-3'-phosphorothioate
  modified_base 18: mod_base = OTHER; note = 2'-O-methyluridine-3'-phosphorothioate
  modified_base 19: mod_base = OTHER; note = 2'-fluoroadenosine
tcggcggtttggatattta

SEQ ID NO: 837 - RNA, 19 nt, synthetic construct
  source 1..19: mol_type = other RNA
  modified_base 1: mod_base = OTHER; note = 2'-fluorocytidine-3'-phosphorothioate
  modified_base 2: mod_base = OTHER; note = 2'-O-methylguanosine-3'-phosphorothioate
  modified_base 3: mod_base = OTHER; note = 2'-fluoroguanosine-3'-phosphate
  modified_base 4: mod_base = OTHER; note = 2'-O-methylcytidine-3'-phosphate
  modified_base 5: mod_base = OTHER; note = 2'-fluoroguanosine-3'-phosphate
  modified_base 6: mod_base = OTHER; note = 2'-O-methylguanosine-3'-phosphate
  modified_base 7: mod_base = OTHER; note = 2'-fluorouridine-3'-phosphate
  modified_base 8: mod_base = OTHER; note = 2'-O-methyluridine-3'-phosphate
  modified_base 9: mod_base = OTHER; note = 2'-fluorouridine-3'-phosphate
  modified_base 10: mod_base = OTHER; note = 2'-O-methylguanosine-3'-phosphate
  modified_base 11: mod_base = OTHER; note = 2'-fluoroguanosine-3'-phosphate
  modified_base 12: mod_base = OTHER; note = 2'-O-methyladenosine-3'-phosphate
  modified_base 13: mod_base = OTHER; note = 2'-fluorouridine-3'-phosphate
  modified_base 14: mod_base = OTHER; note = 2'-O-methyladenosine-3'-phosphate
  modified_base 15: mod_base = OTHER; note = 2'-fluorouridine-3'-phosphate
  modified_base 16: mod_base = OTHER; note = 2'-O-methyluridine-3'-phosphate
  modified_base 17: mod_base = OTHER; note = 2'-fluorouridine-3'-phosphorothioate
  modified_base 18: mod_base = OTHER; note = 2'-O-methyladenosine-3'-phosphorothioate
  modified_base 19: mod_base = OTHER; note = 2'-fluorouridine
cggcggtttggatatttat

SEQ ID NO: 838 - RNA, 19 nt, synthetic construct
  source 1..19: mol_type = other RNA
  modified_base 1: mod_base = OTHER; note = 2'-fluoroguanosine-3'-phosphorothioate
  modified_base 2: mod_base = OTHER; note = 2'-O-methylguanosine-3'-phosphorothioate
  modified_base 3: mod_base = OTHER; note = 2'-fluorocytidine-3'-phosphate
  modified_base 4: mod_base = OTHER; note = 2'-O-methylguanosine-3'-phosphate
  modified_base 5: mod_base = OTHER; note = 2'-fluoroguanosine-3'-phosphate
  modified_base 6: mod_base = OTHER; note = 2'-O-methyluridine-3'-phosphate
  modified_base 7: mod_base = OTHER; note = 2'-fluorouridine-3'-phosphate
  modified_base 8: mod_base = OTHER; note = 2'-O-methyluridine-3'-phosphate
  modified_base 9: mod_base = OTHER; note = 2'-fluoroguanosine-3'-phosphate
  modified_base 10: mod_base = OTHER; note = 2'-O-methylguanosine-3'-phosphate
  modified_base 11: mod_base = OTHER; note = 2'-fluoroadenosine-3'-phosphate
  modified_base 12: mod_base = OTHER; note = 2'-O-methyluridine-3'-phosphate
  modified_base 13: mod_base = OTHER; note = 2'-fluoroadenosine-3'-phosphate
  modified_base 14: mod_base = OTHER; note = 2'-O-methyluridine-3'-phosphate
  modified_base 15: mod_base = OTHER; note = 2'-fluorouridine-3'-phosphate
  modified_base 16: mod_base = OTHER; note = 2'-O-methyluridine-3'-phosphate
  modified_base 17: mod_base = OTHER; note = 2'-fluoroadenosine-3'-phosphorothioate
  modified_base 18: mod_base = OTHER; note = 2'-O-methyluridine-3'-phosphorothioate
  modified_base 19: mod_base = OTHER; note = 2'-fluorouridine
ggcggtttggatatttatt

SEQ ID NO: 839 - RNA, 19 nt, synthetic construct
  source 1..19: mol_type = other RNA
  modified_base 1: mod_base = OTHER; note = 2'-fluoroguanosine-3'-phosphorothioate
  modified_base 2: mod_base = OTHER; note = 2'-O-methylcytidine-3'-phosphorothioate
  modified_base 3: mod_base = OTHER; note = 2'-fluoroguanosine-3'-phosphate
  modified_base 4: mod_base = OTHER; note = 2'-O-methylguanosine-3'-phosphate
  modified_base 5: mod_base = OTHER; note = 2'-fluorouridine-3'-phosphate
  modified_base 6: mod_base = OTHER; note = 2'-O-methyluridine-3'-phosphate
  modified_base 7: mod_base = OTHER; note = 2'-fluorouridine-3'-phosphate
  modified_base 8: mod_base = OTHER; note = 2'-O-methylguanosine-3'-phosphate
  modified_base 9: mod_base = OTHER; note = 2'-fluoroguanosine-3'-phosphate
  modified_base 10: mod_base = OTHER; note = 2'-O-methyladenosine-3'-phosphate
  modified_base 11: mod_base = OTHER; note = 2'-fluorouridine-3'-phosphate
  modified_base 12: mod_base = OTHER; note = 2'-O-methyladenosine-3'-phosphate
  modified_base 13: mod_base = OTHER; note = 2'-fluorouridine-3'-phosphate
  modified_base 14: mod_base = OTHER; note = 2'-O-methyluridine-3'-phosphate
  modified_base 15: mod_base = OTHER; note = 2'-fluorouridine-3'-phosphate
  modified_base 16: mod_base = OTHER; note = 2'-O-methyladenosine-3'-phosphate
  modified_base 17: mod_base = OTHER; note = 2'-fluorouridine-3'-phosphorothioate
  modified_base 18: mod_base = OTHER; note = 2'-O-methyluridine-3'-phosphorothioate
  modified_base 19: mod_base = OTHER; note = 2'-fluorouridine
gcggtttggatatttattt

SEQ ID NO: 840 - RNA, 19 nt, synthetic construct
  source 1..19: mol_type = other RNA
  modified_base 1: mod_base = OTHER; note = 2'-fluorocytidine-3'-phosphorothioate
  modified_base 2: mod_base = OTHER; note = 2'-O-methylguanosine-3'-phosphorothioate
  modified_base 3: mod_base = OTHER; note = 2'-fluoroguanosine-3'-phosphate
  modified_base 4: mod_base = OTHER; note = 2'-O-methyluridine-3'-phosphate
  modified_base 5: mod_base = OTHER; note = 2'-fluorouridine-3'-phosphate
  modified_base 6: mod_base = OTHER; note = 2'-O-methyluridine-3'-phosphate
  modified_base 7: mod_base = OTHER; note = 2'-fluoroguanosine-3'-phosphate
  modified_base 8: mod_base = OTHER; note = 2'-O-methylguanosine-3'-phosphate
  modified_base 9: mod_base = OTHER; note = 2'-fluoroadenosine-3'-phosphate
  modified_base 10: mod_base = OTHER; note = 2'-O-methyluridine-3'-phosphate
  modified_base 11: mod_base = OTHER; note = 2'-fluoroadenosine-3'-phosphate
  modified_base 12: mod_base = OTHER; note = 2'-O-methyluridine-3'-phosphate
  modified_base 13: mod_base = OTHER; note = 2'-fluorouridine-3'-phosphate
  modified_base 14: mod_base = OTHER; note = 2'-O-methyluridine-3'-phosphate
  modified_base 15: mod_base = OTHER; note = 2'-fluoroadenosine-3'-phosphate
  modified_base 16: mod_base = OTHER; note = 2'-O-methyluridine-3'-phosphate
  modified_base 17: mod_base = OTHER; note = 2'-fluorouridine-3'-phosphorothioate
  modified_base 18: mod_base = OTHER; note = 2'-O-methylguanosine-3'-phosphorothioate
  modified_base 19: mod_base = OTHER; note = 2'-fluoroadenosine
cggtttggatatttattga

SEQ ID NO: 841 - RNA, 19 nt, synthetic construct
  source 1..19: mol_type = other RNA
  modified_base 1: mod_base = OTHER; note = 2'-fluoroguanosine-3'-phosphorothioate
  modified_base 2: mod_base = OTHER; note = 2'-O-methylguanosine-3'-phosphorothioate
  modified_base 3: mod_base = OTHER; note = 2'-fluorouridine-3'-phosphate
  modified_base 4: mod_base = OTHER; note = 2'-O-methyluridine-3'-phosphate
  modified_base 5: mod_base = OTHER; note = 2'-fluorouridine-3'-phosphate
  modified_base 6: mod_base = OTHER; note = 2'-O-methylguanosine-3'-phosphate
  modified_base 7: mod_base = OTHER; note = 2'-fluoroguanosine-3'-phosphate
  modified_base 8: mod_base = OTHER; note = 2'-O-methyladenosine-3'-phosphate
  modified_base 9: mod_base = OTHER; note = 2'-fluorouridine-3'-phosphate
  modified_base 10: mod_base = OTHER; note = 2'-O-methyladenosine-3'-phosphate
  modified_base 11: mod_base = OTHER; note = 2'-fluorouridine-3'-phosphate
  modified_base 12: mod_base = OTHER; note = 2'-O-methyluridine-3'-phosphate
  modified_base 13: mod_base = OTHER; note = 2'-fluorouridine-3'-phosphate
  modified_base 14: mod_base = OTHER; note = 2'-O-methyladenosine-3'-phosphate
  modified_base 15: mod_base = OTHER; note = 2'-fluorouridine-3'-phosphate
  modified_base 16: mod_base = OTHER; note = 2'-O-methyluridine-3'-phosphate
  modified_base 17: mod_base = OTHER; note = 2'-fluoroguanosine-3'-phosphorothioate
  modified_base 18: mod_base = OTHER; note = 2'-O-methyladenosine-3'-phosphorothioate
  modified_base 19: mod_base = OTHER; note = 2'-fluorouridine
ggtttggatatttattgat

SEQ ID NO: 842 - RNA, 19 nt, synthetic construct
  source 1..19: mol_type = other RNA
  modified_base 1: mod_base = OTHER; note = 2'-fluoroguanosine-3'-phosphorothioate
  modified_base 2: mod_base = OTHER; note = 2'-O-methyluridine-3'-phosphorothioate
  modified_base 3: mod_base = OTHER; note = 2'-fluorouridine-3'-phosphate
  modified_base 4: mod_base = OTHER; note = 2'-O-methyluridine-3'-phosphate
  modified_base 5: mod_base = OTHER; note = 2'-fluoroguanosine-3'-phosphate
  modified_base 6: mod_base = OTHER; note = 2'-O-methylguanosine-3'-phosphate
  modified_base 7: mod_base = OTHER; note = 2'-fluoroadenosine-3'-phosphate
  modified_base 8: mod_base = OTHER; note = 2'-O-methyluridine-3'-phosphate
  modified_base 9: mod_base = OTHER; note = 2'-fluoroadenosine-3'-phosphate
  modified_base 10: mod_base = OTHER; note = 2'-O-methyluridine-3'-phosphate
  modified_base 11: mod_base = OTHER; note = 2'-fluorouridine-3'-phosphate
  modified_base 12: mod_base = OTHER; note = 2'-O-methyluridine-3'-phosphate
  modified_base 13: mod_base = OTHER; note = 2'-fluoroadenosine-3'-phosphate
  modified_base 14: mod_base = OTHER; note = 2'-O-methyluridine-3'-phosphate
  modified_base 15: mod_base = OTHER; note = 2'-fluorouridine-3'-phosphate
  modified_base 16: mod_base = OTHER; note = 2'-O-methylguanosine-3'-phosphate
  modified_base 17: mod_base = OTHER; note = 2'-fluoroadenosine-3'-phosphorothioate
  modified_base 18: mod_base = OTHER; note = 2'-O-methylcytidine-3'-phosphorothioate
  modified_base 19: mod_base = OTHER; note = 2'-fluorouridine
gtttggatatttattgact

SEQ ID NO: 843 - RNA, 19 nt, synthetic construct
  source 1..19: mol_type = other RNA
  modified_base 1: mod_base = OTHER; note = 2'-fluorouridine-3'-phosphorothioate
  modified_base 2: mod_base = OTHER; note = 2'-O-methyluridine-3'-phosphorothioate
  modified_base 3: mod_base = OTHER; note = 2'-fluorouridine-3'-phosphate
  modified_base 4: mod_base = OTHER; note = 2'-O-methylguanosine-3'-phosphate
  modified_base 5: mod_base = OTHER; note = 2'-fluoroguanosine-3'-phosphate
  modified_base 6: mod_base = OTHER; note = 2'-O-methyladenosine-3'-phosphate
  modified_base 7: mod_base = OTHER; note = 2'-fluorouridine-3'-phosphate
  modified_base 8: mod_base = OTHER; note = 2'-O-methyladenosine-3'-phosphate
  modified_base 9: mod_base = OTHER; note = 2'-fluorouridine-3'-phosphate
  modified_base 10: mod_base = OTHER; note = 2'-O-methyluridine-3'-phosphate
  modified_base 11: mod_base = OTHER; note = 2'-fluorouridine-3'-phosphate
  modified_base 12: mod_base = OTHER; note = 2'-O-methyladenosine-3'-phosphate
  modified_base 13: mod_base = OTHER; note = 2'-fluorouridine-3'-phosphate
  modified_base 14: mod_base = OTHER; note = 2'-O-methyluridine-3'-phosphate
  modified_base 15: mod_base = OTHER; note = 2'-fluoroguanosine-3'-phosphate
  modified_base 16: mod_base = OTHER; note = 2'-O-methyladenosine-3'-phosphate
  modified_base 17: mod_base = OTHER; note = 2'-fluorocytidine-3'-phosphorothioate
  modified_base 18: mod_base = OTHER; note = 2'-O-methylcytidine-3'-phosphorothioate
  modified_base 19: mod_base = OTHER; note = 2'-fluorouridine
tttggatatttattgacct

SEQ ID NO: 844 - RNA, 19 nt, synthetic construct
  source 1..19: mol_type = other RNA
  modified_base 1: mod_base = OTHER; note = 2'-fluorouridine-3'-phosphorothioate
  modified_base 2: mod_base = OTHER; note = 2'-O-methyluridine-3'-phosphorothioate
  modified_base 3: mod_base = OTHER; note = 2'-fluoroguanosine-3'-phosphate
  modified_base 4: mod_base = OTHER; note = 2'-O-methylguanosine-3'-phosphate
  modified_base 5: mod_base = OTHER; note = 2'-fluoroadenosine-3'-phosphate
  modified_base 6: mod_base = OTHER; note = 2'-O-methyluridine-3'-phosphate
  modified_base 7: mod_base = OTHER; note = 2'-fluoroadenosine-3'-phosphate
  modified_base 8: mod_base = OTHER; note = 2'-O-methyluridine-3'-phosphate
  modified_base 9: mod_base = OTHER; note = 2'-fluorouridine-3'-phosphate
  modified_base 10: mod_base = OTHER; note = 2'-O-methyluridine-3'-phosphate
  modified_base 11: mod_base = OTHER; note = 2'-fluoroadenosine-3'-phosphate
  modified_base 12: mod_base = OTHER; note = 2'-O-methyluridine-3'-phosphate
  modified_base 13: mod_base = OTHER; note = 2'-fluorouridine-3'-phosphate
  modified_base 14: mod_base = OTHER; note = 2'-O-methylguanosine-3'-phosphate
  modified_base 15: mod_base = OTHER; note = 2'-fluoroadenosine-3'-phosphate
  modified_base 16: mod_base = OTHER; note = 2'-O-methylcytidine-3'-phosphate
  modified_base 17: mod_base = OTHER; note = 2'-fluorocytidine-3'-phosphorothioate
  modified_base 18: mod_base = OTHER; note = 2'-O-methyluridine-3'-phosphorothioate
  modified_base 19: mod_base = OTHER; note = 2'-fluorouridine
ttggatatttattgacctt

SEQ ID NO: 845 - RNA, 19 nt, synthetic construct
  source 1..19: mol_type = other RNA
  modified_base 1: mod_base = OTHER; note = 2'-fluorouridine-3'-phosphorothioate
  modified_base 2: mod_base = OTHER; note = 2'-O-methylguanosine-3'-phosphorothioate
  modified_base 3: mod_base = OTHER; note = 2'-fluoroguanosine-3'-phosphate
  modified_base 4: mod_base = OTHER; note = 2'-O-methyladenosine-3'-phosphate
  modified_base 5: mod_base = OTHER; note = 2'-fluorouridine-3'-phosphate
  modified_base 6: mod_base = OTHER; note = 2'-O-methyladenosine-3'-phosphate
  modified_base 7: mod_base = OTHER; note = 2'-fluorouridine-3'-phosphate
  modified_base 8: mod_base = OTHER; note = 2'-O-methyluridine-3'-phosphate
  modified_base 9: mod_base = OTHER; note = 2'-fluorouridine-3'-phosphate
  modified_base 10: mod_base = OTHER; note = 2'-O-methyladenosine-3'-phosphate
  modified_base 11: mod_base = OTHER; note = 2'-fluorouridine-3'-phosphate
  modified_base 12: mod_base = OTHER; note = 2'-O-methyluridine-3'-phosphate
  modified_base 13: mod_base = OTHER; note = 2'-fluoroguanosine-3'-phosphate
  modified_base 14: mod_base = OTHER; note = 2'-O-methyladenosine-3'-phosphate
  modified_base 15: mod_base = OTHER; note = 2'-fluorocytidine-3'-phosphate
  modified_base 16: mod_base = OTHER; note = 2'-O-methylcytidine-3'-phosphate
  modified_base 17: mod_base = OTHER; note = 2'-fluorouridine-3'-phosphorothioate
  modified_base 18: mod_base = OTHER; note = 2'-O-methylcytidine-3'-phosphorothioate
  modified_base 19: mod_base = OTHER; note = 2'-fluorouridine
tggatatttattgacctct

SEQ ID NO: 846 - RNA, 19 nt, synthetic construct
  source 1..19: mol_type = other RNA
  modified_base 1: mod_base = OTHER; note = 2'-fluoroguanosine-3'-phosphorothioate
  modified_base 2: mod_base = OTHER; note = 2'-O-methylguanosine-3'-phosphorothioate
  modified_base 3: mod_base = OTHER; note = 2'-fluoroadenosine-3'-phosphate
  modified_base 4: mod_base = OTHER; note = 2'-O-methyluridine-3'-phosphate
  modified_base 5: mod_base = OTHER; note = 2'-fluoroadenosine-3'-phosphate
  modified_base 6: mod_base = OTHER; note = 2'-O-methyluridine-3'-phosphate
  modified_base 7: mod_base = OTHER; note = 2'-fluorouridine-3'-phosphate
  modified_base 8: mod_base = OTHER; note = 2'-O-methyluridine-3'-phosphate
  modified_base 9: mod_base = OTHER; note = 2'-fluoroadenosine-3'-phosphate
  modified_base 10: mod_base = OTHER; note = 2'-O-methyluridine-3'-phosphate
  modified_base 11: mod_base = OTHER; note = 2'-fluorouridine-3'-phosphate
  modified_base 12: mod_base = OTHER; note = 2'-O-methylguanosine-3'-phosphate
  modified_base 13: mod_base = OTHER; note = 2'-fluoroadenosine-3'-phosphate
  modified_base 14: mod_base = OTHER; note = 2'-O-methylcytidine-3'-phosphate
  modified_base 15: mod_base = OTHER; note = 2'-fluorocytidine-3'-phosphate
  modified_base 16: mod_base = OTHER; note = 2'-O-methyluridine-3'-phosphate
  modified_base 17: mod_base = OTHER; note = 2'-fluorocytidine-3'-phosphorothioate
  modified_base 18: mod_base = OTHER; note = 2'-O-methylguanosine-3'-phosphorothioate
  modified_base 19: mod_base = OTHER; note = 2'-fluorouridine
ggatatttattgacctcgt

SEQ ID NO: 847 - RNA, 19 nt, synthetic construct
  source 1..19: mol_type = other RNA
  modified_base 1: mod_base = OTHER; note = 2'-fluoroguanosine-3'-phosphorothioate
  modified_base 2: mod_base = OTHER; note = 2'-O-methyladenosine-3'-phosphorothioate
  modified_base 3: mod_base = OTHER; note = 2'-fluorouridine-3'-phosphate
  modified_base 4: mod_base = OTHER; note = 2'-O-methyladenosine-3'-phosphate
  modified_base 5: mod_base = OTHER; note = 2'-fluorouridine-3'-phosphate
  modified_base 6: mod_base = OTHER; note = 2'-O-methyluridine-3'-phosphate
  modified_base 7: mod_base = OTHER; note = 2'-fluorouridine-3'-phosphate
  modified_base 8: mod_base = OTHER; note = 2'-O-methyladenosine-3'-phosphate
  modified_base 9: mod_base = OTHER; note = 2'-fluorouridine-3'-phosphate
  modified_base 10: mod_base = OTHER; note = 2'-O-methyluridine-3'-phosphate
  modified_base 11: mod_base = OTHER; note = 2'-fluoroguanosine-3'-phosphate
  modified_base 12: mod_base = OTHER; note = 2'-O-methyladenosine-3'-phosphate
  modified_base 13: mod_base = OTHER; note = 2'-fluorocytidine-3'-phosphate
  modified_base 14: mod_base = OTHER; note = 2'-O-methylcytidine-3'-phosphate
  modified_base 15: mod_base = OTHER; note = 2'-fluorouridine-3'-phosphate
  modified_base 16: mod_base = OTHER; note = 2'-O-methylcytidine-3'-phosphate
  modified_base 17: mod_base = OTHER; note = 2'-fluoroguanosine-3'-phosphorothioate
  modified_base 18: mod_base = OTHER; note = 2'-O-methyluridine-3'-phosphorothioate
  modified_base 19: mod_base = OTHER; note = 2'-fluoroadenosine
gatatttattgacctcgta

SEQ ID NO: 848 - RNA, 19 nt, synthetic construct
  source 1..19: mol_type = other RNA
  modified_base 1: mod_base = OTHER; note = 2'-fluoroadenosine-3'-phosphorothioate
  modified_base 2: mod_base = OTHER; note = 2'-O-methyluridine-3'-phosphorothioate
  modified_base 3: mod_base = OTHER; note = 2'-fluoroadenosine-3'-phosphate
  modified_base 4: mod_base = OTHER; note = 2'-O-methyluridine-3'-phosphate
  modified_base 5: mod_base = OTHER; note = 2'-fluorouridine-3'-phosphate
  modified_base 6: mod_base = OTHER; note = 2'-O-methyluridine-3'-phosphate
  modified_base 7: mod_base = OTHER; note = 2'-fluoroadenosine-3'-phosphate
  modified_base 8: mod_base = OTHER; note = 2'-O-methyluridine-3'-phosphate
  modified_base 9: mod_base = OTHER; note = 2'-fluorouridine-3'-phosphate
  modified_base 10: mod_base = OTHER; note = 2'-O-methylguanosine-3'-phosphate
  modified_base 11: mod_base = OTHER; note = 2'-fluoroadenosine-3'-phosphate
  modified_base 12: mod_base = OTHER; note = 2'-O-methylcytidine-3'-phosphate
  modified_base 13: mod_base = OTHER; note = 2'-fluorocytidine-3'-phosphate
  modified_base 14: mod_base = OTHER; note = 2'-O-methyluridine-3'-phosphate
  modified_base 15: mod_base = OTHER; note = 2'-fluorocytidine-3'-phosphate
  modified_base 16: mod_base = OTHER; note = 2'-O-methylguanosine-3'-phosphate
  modified_base 17: mod_base = OTHER; note = 2'-fluorouridine-3'-phosphorothioate
  modified_base 18: mod_base = OTHER; note = 2'-O-methylcytidine-3'-phosphorothioate
  modified_base 19: mod_base = OTHER; note = 2'-fluorouridine
atatttattgacctcgtct

SEQ ID NO: 849 - RNA, 19 nt, synthetic construct
  source 1..19: mol_type = other RNA
  modified_base 1: mod_base = OTHER; note = 2'-fluorouridine-3'-phosphorothioate
  modified_base 2: mod_base = OTHER; note = 2'-O-methyluridine-3'-phosphorothioate
  modified_base 3: mod_base = OTHER; note = 2'-fluorouridine-3'-phosphate
  modified_base 4: mod_base = OTHER; note = 2'-O-methyladenosine-3'-phosphate
  modified_base 5: mod_base = OTHER; note = 2'-fluorouridine-3'-phosphate
  modified_base 6: mod_base = OTHER; note = 2'-O-methyluridine-3'-phosphate
  modified_base 7: mod_base = OTHER; note = 2'-fluoroguanosine-3'-phosphate
  modified_base 8: mod_base = OTHER; note = 2'-O-methyladenosine-3'-phosphate
  modified_base 9: mod_base = OTHER; note = 2'-fluorocytidine-3'-phosphate
  modified_base 10: mod_base = OTHER; note = 2'-O-methylcytidine-3'-phosphate
  modified_base 11: mod_base = OTHER; note = 2'-fluorouridine-3'-phosphate
  modified_base 12: mod_base = OTHER; note = 2'-O-methylcytidine-3'-phosphate
  modified_base 13: mod_base = OTHER; note = 2'-fluoroguanosine-3'-phosphate
  modified_base 14: mod_base = OTHER; note = 2'-O-methyluridine-3'-phosphate
  modified_base 15: mod_base = OTHER; note = 2'-fluorocytidine-3'-phosphate
  modified_base 16: mod_base = OTHER; note = 2'-O-methylcytidine-3'-phosphate
  modified_base 17: mod_base = OTHER; note = 2'-fluorouridine-3'-phosphorothioate
  modified_base 18: mod_base = OTHER; note = 2'-O-methylcytidine-3'-phosphorothioate
  modified_base 19: mod_base = OTHER; note = 2'-fluoroadenosine
tttattgacctcgtcctca

SEQ ID NO: 850 - RNA, 19 nt, synthetic construct
  source 1..19: mol_type = other RNA
  modified_base 1: mod_base = OTHER; note = 2'-fluoroadenosine-3'-phosphorothioate
  modified_base 2: mod_base = OTHER; note = 2'-O-methyluridine-3'-phosphorothioate
  modified_base 3: mod_base = OTHER; note = 2'-fluorouridine-3'-phosphate
  modified_base 4: mod_base = OTHER; note = 2'-O-methylguanosine-3'-phosphate
  modified_base 5: mod_base = OTHER; note = 2'-fluoroadenosine-3'-phosphate
  modified_base 6: mod_base = OTHER; note = 2'-O-methylcytidine-3'-phosphate
  modified_base 7: mod_base = OTHER; note = 2'-fluorocytidine-3'-phosphate
  modified_base 8: mod_base = OTHER; note = 2'-O-methyluridine-3'-phosphate
  modified_base 9: mod_base = OTHER; note = 2'-fluorocytidine-3'-phosphate
  modified_base 10: mod_base = OTHER; note = 2'-O-methylguanosine-3'-phosphate
  modified_base 11: mod_base = OTHER; note = 2'-fluorouridine-3'-phosphate
  modified_base 12: mod_base = OTHER; note = 2'-O-methylcytidine-3'-phosphate
  modified_base 13: mod_base = OTHER; note = 2'-fluorocytidine-3'-phosphate
  modified_base 14: mod_base = OTHER; note = 2'-O-methyluridine-3'-phosphate
  modified_base 15: mod_base = OTHER; note = 2'-fluorocytidine-3'-phosphate
  modified_base 16: mod_base = OTHER; note = 2'-O-methylcytidine-3'-phosphate
  modified_base 17: mod_base = OTHER; note = 2'-fluoroguanosine-3'-phosphorothioate
  modified_base 18: mod_base = OTHER; note = 2'-O-methyladenosine-3'-phosphorothioate
  modified_base 19: mod_base = OTHER; note = 2'-fluorouridine
attgacctcgtcctccgat

SEQ ID NO: 851 - RNA, 19 nt, synthetic construct
  source 1..19: mol_type = other RNA
  modified_base 1: mod_base = OTHER; note = 2'-fluorouridine-3'-phosphorothioate
  modified_base 2: mod_base = OTHER; note = 2'-O-methylcytidine-3'-phosphorothioate
  modified_base 3: mod_base = OTHER; note = 2'-fluoroguanosine-3'-phosphate
  modified_base 4: mod_base = OTHER; note = 2'-O-methyluridine-3'-phosphate
  modified_base 5: mod_base = OTHER; note = 2'-fluorocytidine-3'-phosphate
  modified_base 6: mod_base = OTHER; note = 2'-O-methylcytidine-3'-phosphate
  modified_base 7: mod_base = OTHER; note = 2'-fluorouridine-3'-phosphate
  modified_base 8: mod_base = OTHER; note = 2'-O-methylcytidine-3'-phosphate
  modified_base 9: mod_base = OTHER; note = 2'-fluorocytidine-3'-phosphate
  modified_base 10: mod_base = OTHER; note = 2'-O-methylguanosine-3'-phosphate
  modified_base 11: mod_base = OTHER; note = 2'-fluoroadenosine-3'-phosphate
  modified_base 12: mod_base = OTHER; note = 2'-O-methylcytidine-3'-phosphate
  modified_base 13: mod_base = OTHER; note = 2'-fluorouridine-3'-phosphate
  modified_base 14: mod_base = OTHER; note = 2'-O-methylcytidine-3'-phosphate
  modified_base 15: mod_base = OTHER; note = 2'-fluoroguanosine-3'-phosphate
  modified_base 16: mod_base = OTHER; note = 2'-O-methylcytidine-3'-phosphate
  modified_base 17: mod_base = OTHER; note = 2'-fluorouridine-3'-phosphorothioate
  modified_base 18: mod_base = OTHER; note = 2'-O-methylguanosine-3'-phosphorothioate
  modified_base 19: mod_base = OTHER; note = 2'-fluoroadenosine
tcgtcctccgactcgctga

SEQ ID NO: 852 - RNA, 19 nt, synthetic construct
  source 1..19: mol_type = other RNA
  modified_base 1: mod_base = OTHER; note = 2'-fluorouridine-3'-phosphorothioate
  modified_base 2: mod_base = OTHER; note = 2'-O-methylcytidine-3'-phosphorothioate
  modified_base 3: mod_base = OTHER; note = 2'-fluorocytidine-3'-phosphate
  modified_base 4: mod_base = OTHER; note = 2'-O-methyluridine-3'-phosphate
  modified_base 5: mod_base = OTHER; note = 2'-fluorocytidine-3'-phosphate
  modified_base 6: mod_base = OTHER; note = 2'-O-methylcytidine-3'-phosphate
  modified_base 7: mod_base = OTHER; note = 2'-fluoroguanosine-3'-phosphate
  modified_base 8: mod_base = OTHER; note = 2'-O-methyladenosine-3'-phosphate
  modified_base 9: mod_base = OTHER; note = 2'-fluorocytidine-3'-phosphate
  modified_base 10: mod_base = OTHER; note = 2'-O-methyluridine-3'-phosphate
  modified_base 11: mod_base = OTHER; note = 2'-fluorocytidine-3'-phosphate
  modified_base 12: mod_base = OTHER; note = 2'-O-methylguanosine-3'-phosphate
  modified_base 13: mod_base = OTHER; note = 2'-fluorocytidine-3'-phosphate
  modified_base 14: mod_base = OTHER; note = 2'-O-methyluridine-3'-phosphate
  modified_base 15: mod_base = OTHER; note = 2'-fluoroguanosine-3'-phosphate
  modified_base 16: mod_base = OTHER; note = 2'-O-methyladenosine-3'-phosphate
  modified_base 17: mod_base = OTHER; note = 2'-fluorocytidine-3'-phosphorothioate
  modified_base 18: mod_base = OTHER; note = 2'-O-methyladenosine-3'-phosphorothioate
  modified_base 19: mod_base = OTHER; note = 2'-fluorouridine
tcctccgactcgctgacat

SEQ ID NO: 853 - RNA, 19 nt, synthetic construct
  source 1..19: mol_type = other RNA
  modified_base 1: mod_base = OTHER; note = 2'-fluorocytidine-3'-phosphorothioate
  modified_base 2: mod_base = OTHER; note = 2'-O-methylcytidine-3'-phosphorothioate
  modified_base 3: mod_base = OTHER; note = 2'-fluorocytidine-3'-phosphate
  modified_base 4: mod_base = OTHER; note = 2'-O-methyladenosine-3'-phosphate
  modified_base 5: mod_base = OTHER; note = 2'-fluoroadenosine-3'-phosphate
  modified_base 6: mod_base = OTHER; note = 2'-O-methyluridine-3'-phosphate
  modified_base 7: mod_base = OTHER; note = 2'-fluorocytidine-3'-phosphate
  modified_base 8: mod_base = OTHER; note = 2'-O-methylcytidine-3'-phosphate
  modified_base 9: mod_base = OTHER; note = 2'-fluoroadenosine-3'-phosphate
  modified_base 10: mod_base = OTHER; note = 2'-O-methylcytidine-3'-phosphate
  modified_base 11: mod_base = OTHER; note = 2'-fluoroguanosine-3'-phosphate
  modified_base 12: mod_base = OTHER; note = 2'-O-methyluridine-3'-phosphate
  modified_base 13: mod_base = OTHER; note = 2'-fluorouridine-3'-phosphate
  modified_base 14: mod_base = OTHER; note = 2'-O-methyluridine-3'-phosphate
  modified_base 15: mod_base = OTHER; note = 2'-fluorouridine-3'-phosphate
  modified_base 16: mod_base = OTHER; note = 2'-O-methylguanosine-3'-phosphate
  modified_base 17: mod_base = OTHER; note = 2'-fluoroguanosine-3'-phosphorothioate
  modified_base 18: mod_base = OTHER; note = 2'-O-methyladenosine-3'-phosphorothioate
  modified_base 19: mod_base = OTHER; note = 2'-fluorouridine
cccaatccacgttttggat

SEQ ID NO: 854 - RNA, 19 nt, synthetic construct
  source 1..19: mol_type = other RNA
  modified_base 1: mod_base = OTHER; note = 2'-fluorocytidine-3'-phosphorothioate
  modified_base 2: mod_base = OTHER; note = 2'-O-methylcytidine-3'-phosphorothioate
  modified_base 3: mod_base = OTHER; note = 2'-fluoroadenosine-3'-phosphate
  modified_base 4: mod_base = OTHER; note = 2'-O-methyladenosine-3'-phosphate
  modified_base 5: mod_base = OTHER; note = 2'-fluorouridine-3'-phosphate
  modified_base 6: mod_base = OTHER; note = 2'-O-methylcytidine-3'-phosphate
  modified_base 7: mod_base = OTHER; note = 2'-fluorocytidine-3'-phosphate
  modified_base 8: mod_base = OTHER; note = 2'-O-methyladenosine-3'-phosphate
  modified_base 9: mod_base = OTHER; note = 2'-fluorocytidine-3'-phosphate
  modified_base 10: mod_base = OTHER; note = 2'-O-methylguanosine-3'-phosphate
  modified_base 11: mod_base = OTHER; note = 2'-fluorouridine-3'-phosphate
  modified_base 12: mod_base = OTHER; note = 2'-O-methyluridine-3'-phosphate
  modified_base 13: mod_base = OTHER; note = 2'-fluorouridine-3'-phosphate
  modified_base 14: mod_base = OTHER; note = 2'-O-methyluridine-3'-phosphate
  modified_base 15: mod_base = OTHER; note = 2'-fluoroguanosine-3'-phosphate
  modified_base 16: mod_base = OTHER; note = 2'-O-methylguanosine-3'-phosphate
  modified_base 17: mod_base = OTHER; note = 2'-fluoroadenosine-3'-phosphorothioate
  modified_base 18: mod_base = OTHER; note = 2'-O-methyluridine-3'-phosphorothioate
  modified_base 19: mod_base = OTHER; note = 2'-fluorouridine
ccaatccacgttttggatt

SEQ ID NO: 855 - RNA, 19 nt, synthetic construct
  source 1..19: mol_type = other RNA
  modified_base 1: mod_base = OTHER; note = 2'-fluorocytidine-3'-phosphorothioate
  modified_base 2: mod_base = OTHER; note = 2'-O-methyladenosine-3'-phosphorothioate
  modified_base 3: mod_base = OTHER; note = 2'-fluoroadenosine-3'-phosphate
  modified_base 4: mod_base = OTHER; note = 2'-O-methyluridine-3'-phosphate
  modified_base 5: mod_base = OTHER; note = 2'-fluorocytidine-3'-phosphate
  modified_base 6: mod_base = OTHER; note = 2'-O-methylcytidine-3'-phosphate
  modified_base 7: mod_base = OTHER; note = 2'-fluoroadenosine-3'-phosphate
  modified_base 8: mod_base = OTHER; note = 2'-O-methylcytidine-3'-phosphate
  modified_base 9: mod_base = OTHER; note = 2'-fluoroguanosine-3'-phosphate
  modified_base 10: mod_base = OTHER; note = 2'-O-methyluridine-3'-phosphate
  modified_base 11: mod_base = OTHER; note = 2'-fluorouridine-3'-phosphate
  modified_base 12: mod_base = OTHER; note = 2'-O-methyluridine-3'-phosphate
  modified_base 13: mod_base = OTHER; note = 2'-fluorouridine-3'-phosphate
  modified_base 14: mod_base = OTHER; note = 2'-O-methylguanosine-3'-phosphate
  modified_base 15: mod_base = OTHER; note = 2'-fluoroguanosine-3'-phosphate
  modified_base 16: mod_base = OTHER; note = 2'-O-methyladenosine-3'-phosphate
  modified_base 17: mod_base = OTHER; note = 2'-fluorouridine-3'-phosphorothioate
  modified_base 18: mod_base = OTHER; note = 2'-O-methylguanosine-3'-phosphorothioate
  modified_base 19: mod_base = OTHER; note = 2'-fluoroadenosine
caatccacgttttggatga

SEQ ID NO: 856 - RNA, 19 nt, synthetic construct
  source 1..19: mol_type = other RNA
  modified_base 1: mod_base = OTHER; note = 2'-fluoroadenosine-3'-phosphorothioate
  modified_base 2: mod_base = OTHER; note = 2'-O-methyladenosine-3'-phosphorothioate
  modified_base 3: mod_base = OTHER; note = 2'-fluorouridine-3'-phosphate
  modified_base 4: mod_base = OTHER; note = 2'-O-methylcytidine-3'-phosphate
  modified_base 5: mod_base = OTHER; note = 2'-fluorocytidine-3'-phosphate
  modified_base 6: mod_base = OTHER; note = 2'-O-methyladenosine-3'-phosphate
  modified_base 7: mod_base = OTHER; note = 2'-fluorocytidine-3'-phosphate
  modified_base 8: mod_base = OTHER; note = 2'-O-methylguanosine-3'-phosphate
  modified_base 9: mod_base = OTHER; note = 2'-fluorouridine-3'-phosphate
  modified_base 10: mod_base = OTHER; note = 2'-O-methyluridine-3'-phosphate
  modified_base 11: mod_base = OTHER; note = 2'-fluorouridine-3'-phosphate
  modified_base 12: mod_base = OTHER; note = 2'-O-methyluridine-3'-phosphate
  modified_base 13: mod_base = OTHER; note = 2'-fluoroguanosine-3'-phosphate
  modified_base 14: mod_base = OTHER; note = 2'-O-methylguanosine-3'-phosphate
  modified_base 15: mod_base = OTHER; note = 2'-fluoroadenosine-3'-phosphate
  modified_base 16: mod_base = OTHER; note = 2'-O-methyluridine-3'-phosphate
  modified_base 17: mod_base = OTHER; note = 2'-fluoroguanosine-3'-phosphorothioate
  modified_base 18: mod_base = OTHER; note = 2'-O-methylcytidine-3'-phosphorothioate
  modified_base 19: mod_base = OTHER; note = 2'-fluoroadenosine
aatccacgttttggatgca

SEQ ID NO: 857 - RNA, 19 nt, synthetic construct
  source 1..19: mol_type = other RNA
  modified_base 1: mod_base = OTHER; note = 2'-fluoroadenosine-3'-phosphorothioate
  modified_base 2: mod_base = OTHER; note = 2'-O-methyluridine-3'-phosphorothioate
  modified_base 3: mod_base = OTHER; note = 2'-fluorocytidine-3'-phosphate
  modified_base 4: mod_base = OTHER; note = 2'-O-methylcytidine-3'-phosphate
  modified_base 5: mod_base = OTHER; note = 2'-fluoroadenosine-3'-phosphate
  modified_base 6: mod_base = OTHER; note = 2'-O-methylcytidine-3'-phosphate
  modified_base 7: mod_base = OTHER; note = 2'-fluoroguanosine-3'-phosphate
  modified_base 8: mod_base = OTHER; note = 2'-O-methyluridine-3'-phosphate
  modified_base 9: mod_base = OTHER; note = 2'-fluorouridine-3'-phosphate
  modified_base 10: mod_base = OTHER; note = 2'-O-methyluridine-3'-phosphate
  modified_base 11: mod_base = OTHER; note = 2'-fluorouridine-3'-phosphate
  modified_base 12: mod_base = OTHER; note = 2'-O-methylguanosine-3'-phosphate
  modified_base 13: mod_base = OTHER; note = 2'-fluoroguanosine-3'-phosphate
  modified_base 14: mod_base = OTHER; note = 2'-O-methyladenosine-3'-phosphate
  modified_base 15: mod_base = OTHER; note = 2'-fluorouridine-3'-phosphate
  modified_base 16: mod_base = OTHER; note = 2'-O-methylguanosine-3'-phosphate
  modified_base 17: mod_base = OTHER; note = 2'-fluorocytidine-3'-phosphorothioate
  modified_base 18: mod_base = OTHER; note = 2'-O-methyladenosine-3'-phosphorothioate
  modified_base 19: mod_base = OTHER; note = 2'-fluorouridine
atccacgttttggatgcat

SEQ ID NO: 858 - RNA, 19 nt, synthetic construct
  source 1..19: mol_type = other RNA
  modified_base 1: mod_base = OTHER; note = 2'-fluorocytidine-3'-phosphorothioate
  modified_base 2: mod_base = OTHER; note = 2'-O-methylcytidine-3'-phosphorothioate
  modified_base 3: mod_base = OTHER; note = 2'-fluoroadenosine-3'-phosphate
  modified_base 4: mod_base = OTHER; note = 2'-O-methylcytidine-3'-phosphate
  modified_base 5: mod_base = OTHER; note = 2'-fluoroguanosine-3'-phosphate
  modified_base 6: mod_base = OTHER; note = 2'-O-methyluridine-3'-phosphate
  modified_base 7: mod_base = OTHER; note = 2'-fluorouridine-3'-phosphate
  modified_base 8: mod_base = OTHER; note = 2'-O-methyluridine-3'-phosphate
  modified_base 9: mod_base = OTHER; note = 2'-fluorouridine-3'-phosphate
  modified_base 10: mod_base = OTHER; note = 2'-O-methylguanosine-3'-phosphate
  modified_base 11: mod_base = OTHER; note = 2'-fluoroguanosine-3'-phosphate
  modified_base 12: mod_base = OTHER; note = 2'-O-methyladenosine-3'-phosphate
  modified_base 13: mod_base = OTHER; note = 2'-fluorouridine-3'-phosphate
  modified_base 14: mod_base = OTHER; note = 2'-O-methylguanosine-3'-phosphate
  modified_base 15: mod_base = OTHER; note = 2'-fluorocytidine-3'-phosphate
  modified_base 16: mod_base = OTHER; note = 2'-O-methyladenosine-3'-phosphate
  modified_base 17: mod_base = OTHER; note = 2'-fluorocytidine-3'-phosphorothioate
  modified_base 18: mod_base = OTHER; note = 2'-O-methyluridine-3'-phosphorothioate
  modified_base 19: mod_base = OTHER; note = 2'-fluorouridine
ccacgttttggatgcactt

SEQ ID NO: 859 - RNA, 19 nt, synthetic construct
  source 1..19: mol_type = other RNA
  modified_base 1: mod_base = OTHER; note = 2'-fluorocytidine-3'-phosphorothioate
  modified_base 2: mod_base = OTHER; note = 2'-O-methyladenosine-3'-phosphorothioate
  modified_base 3: mod_base = OTHER; note = 2'-fluorocytidine-3'-phosphate
  modified_base 4: mod_base = OTHER; note = 2'-O-methylguanosine-3'-phosphate
  modified_base 5: mod_base = OTHER; note = 2'-fluorouridine-3'-phosphate
  modified_base 6: mod_base = OTHER; note = 2'-O-methyluridine-3'-phosphate
  modified_base 7: mod_base = OTHER; note = 2'-fluorouridine-3'-phosphate
  modified_base 8: mod_base = OTHER; note = 2'-O-methyluridine-3'-phosphate
  modified_base 9: mod_base = OTHER; note = 2'-fluoroguanosine-3'-phosphate
  modified_base 10: mod_base = OTHER; note = 2'-O-methylguanosine-3'-phosphate
  modified_base 11: mod_base = OTHER; note = 2'-fluoroadenosine-3'-phosphate
  modified_base 12: mod_base = OTHER; note = 2'-O-methyluridine-3'-phosphate
  modified_base 13: mod_base = OTHER; note = 2'-fluoroguanosine-3'-phosphate
  modified_base 14: mod_base = OTHER; note = 2'-O-methylcytidine-3'-phosphate
  modified_base 15: mod_base = OTHER; note = 2'-fluoroadenosine-3'-phosphate
  modified_base 16: mod_base = OTHER; note = 2'-O-methylcytidine-3'-phosphate
  modified_base 17: mod_base = OTHER; note = 2'-fluorouridine-3'-phosphorothioate
  modified_base 18: mod_base = OTHER; note = 2'-O-methylguanosine-3'-phosphorothioate
  modified_base 19: mod_base = OTHER; note = 2'-fluoroadenosine
cacgttttggatgcactga

SEQ ID NO: 860 - RNA, 19 nt, synthetic construct
  source 1..19: mol_type = other RNA
  modified_base 1: mod_base = OTHER; note = 2'-fluoroadenosine-3'-phosphorothioate
  modified_base 2: mod_base = OTHER; note = 2'-O-methylcytidine-3'-phosphorothioate
  modified_base 3: mod_base = OTHER; note = 2'-fluoroguanosine-3'-phosphate
  modified_base 4: mod_base = OTHER; note = 2'-O-methyluridine-3'-phosphate
  modified_base 5: mod_base = OTHER; note = 2'-fluorouridine-3'-phosphate
  modified_base 6: mod_base = OTHER; note = 2'-O-methyluridine-3'-phosphate
  modified_base 7: mod_base = OTHER; note = 2'-fluorouridine-3'-phosphate
  modified_base 8: mod_base = OTHER; note = 2'-O-methylguanosine-3'-phosphate
  modified_base 9: mod_base = OTHER; note = 2'-fluoroguanosine-3'-phosphate
  modified_base 10: mod_base = OTHER; note = 2'-O-methyladenosine-3'-phosphate
  modified_base 11: mod_base = OTHER; note = 2'-fluorouridine-3'-phosphate
  modified_base 12: mod_base = OTHER; note = 2'-O-methylguanosine-3'-phosphate
  modified_base 13: mod_base = OTHER; note = 2'-fluorocytidine-3'-phosphate
  modified_base 14: mod_base = OTHER; note = 2'-O-methyladenosine-3'-phosphate
  modified_base 15: mod_base = OTHER; note = 2'-fluorocytidine-3'-phosphate
  modified_base 16: mod_base = OTHER; note = 2'-O-methyluridine-3'-phosphate
  modified_base 17: mod_base = OTHER; note = 2'-fluoroguanosine-3'-phosphorothioate
  modified_base 18: mod_base = OTHER; note = 2'-O-methyladenosine-3'-phosphorothioate
  modified_base 19: mod_base = OTHER; note = 2'-fluorouridine
acgttttggatgcactgat

SEQ ID NO: 861 - RNA, 19 nt, synthetic construct
  source 1..19: mol_type = other RNA
  modified_base 1: mod_base = OTHER; note = 2'-fluorocytidine-3'-phosphorothioate
  modified_base 2: mod_base = OTHER; note = 2'-O-methylguanosine-3'-phosphorothioate
  modified_base 3: mod_base = OTHER; note = 2'-fluorouridine-3'-phosphate
  modified_base 4: mod_base = OTHER; note = 2'-O-methyluridine-3'-phosphate
  modified_base 5: mod_base = OTHER; note = 2'-fluorouridine-3'-phosphate
  modified_base 6: mod_base = OTHER; note = 2'-O-methyluridine-3'-phosphate
  modified_base 7: mod_base = OTHER; note = 2'-fluoroguanosine-3'-phosphate
  modified_base 8: mod_base = OTHER; note = 2'-O-methylguanosine-3'-phosphate
  modified_base 9: mod_base = OTHER; note = 2'-fluoroadenosine-3'-phosphate
  modified_base 10: mod_base = OTHER; note = 2'-O-methyluridine-3'-phosphate
  modified_base 11: mod_base = OTHER; note = 2'-fluoroguanosine-3'-phosphate
  modified_base 12: mod_base = OTHER; note = 2'-O-methylcytidine-3'-phosphate
  modified_base 13: mod_base = OTHER; note = 2'-fluoroadenosine-3'-phosphate
  modified_base 14: mod_base = OTHER; note = 2'-O-methylcytidine-3'-phosphate
  modified_base 15: mod_base = OTHER; note = 2'-fluorouridine-3'-phosphate
  modified_base 16: mod_base = OTHER; note = 2'-O-methylguanosine-3'-phosphate
  modified_base 17: mod_base = OTHER; note = 2'-fluoroadenosine-3'-phosphorothioate
  modified_base 18: mod_base = OTHER; note = 2'-O-methylguanosine-3'-phosphorothioate
  modified_base 19: mod_base = OTHER; note = 2'-fluoroadenosine
cgttttggatgcactgaga

SEQ ID NO: 862 - RNA, 19 nt, synthetic construct
  source 1..19: mol_type = other RNA
  modified_base 1: mod_base = OTHER; note = 2'-fluoroguanosine-3'-phosphorothioate
  modified_base 2: mod_base = OTHER; note = 2'-O-methyluridine-3'-phosphorothioate
  modified_base 3: mod_base = OTHER; note = 2'-fluorouridine-3'-phosphate
  modified_base 4: mod_base = OTHER; note = 2'-O-methyluridine-3'-phosphate
  modified_base 5: mod_base = OTHER; note = 2'-fluorouridine-3'-phosphate
  modified_base 6: mod_base = OTHER; note = 2'-O-methylguanosine-3'-phosphate
  modified_base 7: mod_base = OTHER; note = 2'-fluoroguanosine-3'-phosphate
  modified_base 8: mod_base = OTHER; note = 2'-O-methyladenosine-3'-phosphate
  modified_base 9: mod_base = OTHER; note = 2'-fluorouridine-3'-phosphate
  modified_base 10: mod_base = OTHER; note = 2'-O-methylguanosine-3'-phosphate
  modified_base 11: mod_base = OTHER; note = 2'-fluorocytidine-3'-phosphate
  modified_base 12: mod_base = OTHER; note = 2'-O-methyladenosine-3'-phosphate
  modified_base 13: mod_base = OTHER; note = 2'-fluorocytidine-3'-phosphate
  modified_base 14: mod_base = OTHER; note = 2'-O-methyluridine-3'-phosphate
  modified_base 15: mod_base = OTHER; note = 2'-fluoroguanosine-3'-phosphate
  modified_base 16: mod_base = OTHER; note = 2'-O-methyladenosine-3'-phosphate
  modified_base 17: mod_base = OTHER; note = 2'-fluoroguanosine-3'-phosphorothioate
  modified_base 18: mod_base = OTHER; note = 2'-O-methyladenosine-3'-phosphorothioate
  modified_base 19: mod_base = OTHER; note = 2'-fluorouridine
gttttggatgcactgagat

SEQ ID NO: 863 - RNA, 19 nt, synthetic construct
  source 1..19: mol_type = other RNA
  modified_base 1: mod_base = OTHER; note = 2'-fluorouridine-3'-phosphorothioate
  modified_base 2: mod_base = OTHER; note = 2'-O-methyluridine-3'-phosphorothioate
  modified_base 3: mod_base = OTHER; note = 2'-fluorouridine-3'-phosphate
  modified_base 4: mod_base = OTHER; note = 2'-O-methyluridine-3'-phosphate
  modified_base 5: mod_base = OTHER; note = 2'-fluoroguanosine-3'-phosphate
  modified_base 6: mod_base = OTHER; note = 2'-O-methylguanosine-3'-phosphate
  modified_base 7: mod_base = OTHER; note = 2'-fluoroadenosine-3'-phosphate
  modified_base 8: mod_base = OTHER; note = 2'-O-methyluridine-3'-phosphate
  modified_base 9: mod_base = OTHER; note = 2'-fluoroguanosine-3'-phosphate
  modified_base 10: mod_base = OTHER; note = 2'-O-methylcytidine-3'-phosphate
  modified_base 11: mod_base = OTHER; note = 2'-fluoroadenosine-3'-phosphate
  modified_base 12: mod_base = OTHER; note = 2'-O-methylcytidine-3'-phosphate
  modified_base 13: mod_base = OTHER; note = 2'-fluorouridine-3'-phosphate
  modified_base 14: mod_base = OTHER; note = 2'-O-methylguanosine-3'-phosphate
  modified_base 15: mod_base = OTHER; note = 2'-fluoroadenosine-3'-phosphate
  modified_base 16: mod_base = OTHER; note = 2'-O-methylguanosine-3'-phosphate
  modified_base 17: mod_base = OTHER; note = 2'-fluoroadenosine-3'-phosphorothioate
  modified_base 18: mod_base = OTHER; note = 2'-O-methylcytidine-3'-phosphorothioate
  modified_base 19: mod_base = OTHER; note = 2'-fluorouridine
ttttggatgcactgagact

SEQ ID NO: 864 - RNA, 19 nt, synthetic construct
  source 1..19: mol_type = other RNA
  modified_base 1: mod_base = OTHER; note = 2'-fluorocytidine-3'-phosphorothioate
  modified_base 2: mod_base = OTHER; note = 2'-O-methylcytidine-3'-phosphorothioate
  modified_base 3: mod_base = OTHER; note = 2'-fluorouridine-3'-phosphate
  modified_base 4: mod_base = OTHER; note = 2'-O-methylcytidine-3'-phosphate
  modified_base 5: mod_base = OTHER; note = 2'-fluoroguanosine-3'-phosphate
  modified_base 6: mod_base = OTHER; note = 2'-O-methylguanosine-3'-phosphate
  modified_base 7: mod_base = OTHER; note = 2'-fluorouridine-3'-phosphate
  modified_base 8: mod_base = OTHER; note = 2'-O-methyladenosine-3'-phosphate
  modified_base 9: mod_base = OTHER; note = 2'-fluorouridine-3'-phosphate
  modified_base 10: mod_base = OTHER; note = 2'-O-methyluridine-3'-phosphate
  modified_base 11: mod_base = OTHER; note = 2'-fluorouridine-3'-phosphate
  modified_base 12: mod_base = OTHER; note = 2'-O-methyladenosine-3'-phosphate
  modified_base 13: mod_base = OTHER; note = 2'-fluorouridine-3'-phosphate
  modified_base 14: mod_base = OTHER; note = 2'-O-methyluridine-3'-phosphate
  modified_base 15: mod_base = OTHER; note = 2'-fluoroguanosine-3'-phosphate
  modified_base 16: mod_base = OTHER; note = 2'-O-methyluridine-3'-phosphate
  modified_base 17: mod_base = OTHER; note = 2'-fluorocytidine-3'-phosphorothioate
  modified_base 18: mod_base = OTHER; note = 2'-O-methyluridine-3'-phosphorothioate
  modified_base 19: mod_base = OTHER; note = 2'-fluoroadenosine
cctcggtatttattgtcta

SEQ ID NO: 865 - RNA, 19 nt, synthetic construct
  source 1..19: mol_type = other RNA
  modified_base 1: mod_base = OTHER; note = 2'-fluorocytidine-3'-phosphorothioate
  modified_base 2: mod_base = OTHER; note = 2'-O-methylcytidine-3'-phosphorothioate
  modified_base 3: mod_base = OTHER; note = 2'-fluorocytidine-3'-phosphate
  modified_base 4: mod_base = OTHER; note = 2'-O-methylguanosine-3'-phosphate
  modified_base 5: mod_base = OTHER; note = 2'-fluoroadenosine-3'-phosphate
  modified_base 6: mod_base = OTHER; note = 2'-O-methylcytidine-3'-phosphate
  modified_base 7: mod_base = OTHER; note = 2'-fluorocytidine-3'-phosphate
  modified_base 8: mod_base = OTHER; note = 2'-O-methylcytidine-3'-phosphate
  modified_base 9: mod_base = OTHER; note = 2'-fluorouridine-3'-phosphate
  modified_base 10: mod_base = OTHER; note = 2'-O-methylcytidine-3'-phosphate
  modified_base 11: mod_base = OTHER; note = 2'-fluoroguanosine-3'-phosphate
  modified_base 12: mod_base = OTHER; note = 2'-O-methylcytidine-3'-phosphate
  modified_base 13: mod_base = OTHER; note = 2'-fluoroguanosine-3'-phosphate
  modified_base 14: mod_base = OTHER; note = 2'-O-methyladenosine-3'-phosphate
  modified_base 15: mod_base = OTHER; note = 2'-fluoroadenosine-3'-phosphate
  modified_base 16: mod_base = OTHER; note = 2'-O-methyluridine-3'-phosphate
  modified_base 17: mod_base = OTHER; note = 2'-fluoroadenosine-3'-phosphorothioate
  modified_base 18: mod_base = OTHER; note = 2'-O-methyladenosine-3'-phosphorothioate
  modified_base 19: mod_base = OTHER; note = 2'-fluoroadenosine
cccgaccctcgcgaataaa

SEQ ID NO: 866 - RNA, 19 nt, synthetic construct
  source 1..19: mol_type = other RNA
  modified_base 1: mod_base = OTHER; note = 2'-fluorocytidine-3'-phosphorothioate
  modified_base 2: mod_base = OTHER; note = 2'-O-methylcytidine-3'-phosphorothioate
  modified_base 3: mod_base = OTHER; note = 2'-fluoroguanosine-3'-phosphate
  modified_base 4: mod_base = OTHER; note = 2'-O-methyladenosine-3'-phosphate
  modified_base 5: mod_base = OTHER; note = 2'-fluorocytidine-3'-phosphate
  modified_base 6: mod_base = OTHER; note = 2'-O-methylcytidine-3'-phosphate
  modified_base 7: mod_base = OTHER; note = 2'-fluorocytidine-3'-phosphate
  modified_base 8: mod_base = OTHER; note = 2'-O-methyluridine-3'-phosphate
  modified_base 9: mod_base = OTHER; note = 2'-fluorocytidine-3'-phosphate
  modified_base 10: mod_base = OTHER; note = 2'-O-methylguanosine-3'-phosphate
  modified_base 11: mod_base = OTHER; note = 2'-fluorocytidine-3'-phosphate
  modified_base 12: mod_base = OTHER; note = 2'-O-methylguanosine-3'-phosphate
  modified_base 13: mod_base = OTHER; note = 2'-fluoroadenosine-3'-phosphate
  modified_base 14: mod_base = OTHER; note = 2'-O-methyladenosine-3'-phosphate
  modified_base 15: mod_base = OTHER; note = 2'-fluorouridine-3'-phosphate
  modified_base 16: mod_base = OTHER; note = 2'-O-methyladenosine-3'-phosphate
  modified_base 17: mod_base = OTHER; note = 2'-fluoroadenosine-3'-phosphorothioate
  modified_base 18: mod_base = OTHER; note = 2'-O-methyladenosine-3'-phosphorothioate
  modified_base 19: mod_base = OTHER; note = 2'-fluoroadenosine
ccgaccctcgcgaataaaa

SEQ ID NO: 867 - RNA, 19 nt, synthetic construct
  source 1..19: mol_type = other RNA
  modified_base 1: mod_base = OTHER; note = 2'-fluorocytidine-3'-phosphorothioate
  modified_base 2: mod_base = OTHER; note = 2'-O-methylguanosine-3'-phosphorothioate
  modified_base 3: mod_base = OTHER; note = 2'-fluoroadenosine-3'-phosphate
  modified_base 4: mod_base = OTHER; note = 2'-O-methylcytidine-3'-phosphate
  modified_base 5: mod_base = OTHER; note = 2'-fluorocytidine-3'-phosphate
  modified_base 6: mod_base = OTHER; note = 2'-O-methylcytidine-3'-phosphate
  modified_base 7: mod_base = OTHER; note = 2'-fluorouridine-3'-phosphate
  modified_base 8: mod_base = OTHER; note = 2'-O-methylcytidine-3'-phosphate
  modified_base 9: mod_base = OTHER; note = 2'-fluoroguanosine-3'-phosphate
  modified_base 10: mod_base = OTHER; note = 2'-O-methylcytidine-3'-phosphate
  modified_base 11: mod_base = OTHER; note = 2'-fluoroguanosine-3'-phosphate
  modified_base 12: mod_base = OTHER; note = 2'-O-methyladenosine-3'-phosphate
  modified_base 13: mod_base = OTHER; note = 2'-fluoroadenosine-3'-phosphate
  modified_base 14: mod_base = OTHER; note = 2'-O-methyluridine-3'-phosphate
  modified_base 15: mod_base = OTHER; note = 2'-fluoroadenosine-3'-phosphate
  modified_base 16: mod_base = OTHER; note = 2'-O-methyladenosine-3'-phosphate
  modified_base 17: mod_base = OTHER; note = 2'-fluoroadenosine-3'-phosphorothioate
  modified_base 18: mod_base = OTHER; note = 2'-O-methyladenosine-3'-phosphorothioate
  modified_base 19: mod_base = OTHER; note = 2'-fluorouridine
cgaccctcgcgaataaaat

SEQ ID NO: 868 - RNA, 19 nt, synthetic construct
  source 1..19: mol_type = other RNA
  modified_base 1: mod_base = OTHER; note = 2'-fluoroguanosine-3'-phosphorothioate
  modified_base 2: mod_base = OTHER; note = 2'-O-methyladenosine-3'-phosphorothioate
  modified_base 3: mod_base = OTHER; note = 2'-fluorocytidine-3'-phosphate
  modified_base 4: mod_base = OTHER; note = 2'-O-methylcytidine-3'-phosphate
  modified_base 5: mod_base = OTHER; note = 2'-fluorocytidine-3'-phosphate
  modified_base 6: mod_base = OTHER; note = 2'-O-methyluridine-3'-phosphate
  modified_base 7: mod_base = OTHER; note = 2'-fluorocytidine-3'-phosphate
  modified_base 8: mod_base = OTHER; note = 2'-O-methylguanosine-3'-phosphate
  modified_base 9: mod_base = OTHER; note = 2'-fluorocytidine-3'-phosphate
  modified_base 10: mod_base = OTHER; note = 2'-O-methylguanosine-3'-phosphate
  modified_base 11: mod_base = OTHER; note = 2'-fluoroadenosine-3'-phosphate
  modified_base 12: mod_base = OTHER; note = 2'-O-methyladenosine-3'-phosphate
  modified_base 13: mod_base = OTHER; note = 2'-fluorouridine-3'-phosphate
  modified_base 14: mod_base = OTHER; note = 2'-O-methyladenosine-3'-phosphate
  modified_base 15: mod_base = OTHER; note = 2'-fluoroadenosine-3'-phosphate
  modified_base 16: mod_base = OTHER; note = 2'-O-methyladenosine-3'-phosphate
  modified_base 17: mod_base = OTHER; note = 2'-fluoroadenosine-3'-phosphorothioate
  modified_base 18: mod_base = OTHER; note = 2'-O-methylguanosine-3'-phosphorothioate
  modified_base 19: mod_base = OTHER; note = 2'-fluorouridine
gaccctcgcgaataaaagt

SEQ ID NO: 869 - RNA, 19 nt, synthetic construct
  source 1..19: mol_type = other RNA
  modified_base 1: mod_base = OTHER; note = 2'-fluoroadenosine-3'-phosphorothioate
  modified_base 2: mod_base = OTHER; note = 2'-O-methylcytidine-3'-phosphorothioate
  modified_base 3: mod_base = OTHER; note = 2'-fluorocytidine-3'-phosphate
  modified_base 4: mod_base = OTHER; note = 2'-O-methylcytidine-3'-phosphate
  modified_base 5: mod_base = OTHER; note = 2'-fluorouridine-3'-phosphate
  modified_base 6: mod_base = OTHER; note = 2'-O-methylcytidine-3'-phosphate
  modified_base 7: mod_base = OTHER; note = 2'-fluoroguanosine-3'-phosphate
  modified_base 8: mod_base = OTHER; note = 2'-O-methylcytidine-3'-phosphate
  modified_base 9: mod_base = OTHER; note = 2'-fluoroguanosine-3'-phosphate
  modified_base 10: mod_base = OTHER; note = 2'-O-methyladenosine-3'-phosphate
  modified_base 11: mod_base = OTHER; note = 2'-fluoroadenosine-3'-phosphate
  modified_base 12: mod_base = OTHER; note = 2'-O-methyluridine-3'-phosphate
  modified_base 13: mod_base = OTHER; note = 2'-fluoroadenosine-3'-phosphate
  modified_base 14: mod_base = OTHER; note = 2'-O-methyladenosine-3'-phosphate
  modified_base 15: mod_base = OTHER; note = 2'-fluoroadenosine-3'-phosphate
  modified_base 16: mod_base = OTHER; note = 2'-O-methyladenosine-3'-phosphate
  modified_base 17: mod_base = OTHER; note = 2'-fluoroguanosine-3'-phosphorothioate
  modified_base 18: mod_base = OTHER; note = 2'-O-methylguanosine-3'-phosphorothioate
  modified_base 19: mod_base = OTHER; note = 2'-fluorouridine
accctcgcgaataaaaggt

SEQ ID NO: 870 - RNA, 19 nt, synthetic construct
  source 1..19: mol_type = other RNA
  modified_base 1: mod_base = OTHER; note = 2'-fluorocytidine-3'-phosphorothioate
  modified_base 2: mod_base = OTHER; note = 2'-O-methylcytidine-3'-phosphorothioate
  modified_base 3: mod_base = OTHER; note = 2'-fluorocytidine-3'-phosphate
  modified_base 4: mod_base = OTHER; note = 2'-O-methyluridine-3'-phosphate
  modified_base 5: mod_base = OTHER; note = 2'-fluorocytidine-3'-phosphate
  modified_base 6: mod_base = OTHER; note = 2'-O-methylguanosine-3'-phosphate
  modified_base 7: mod_base = OTHER; note = 2'-fluorocytidine-3'-phosphate
  modified_base 8: mod_base = OTHER; note = 2'-O-methylguanosine-3'-phosphate
  modified_base 9: mod_base = OTHER; note = 2'-fluoroadenosine-3'-phosphate
  modified_base 10: mod_base = OTHER; note = 2'-O-methyladenosine-3'-phosphate
  modified_base 11: mod_base = OTHER; note = 2'-fluorouridine-3'-phosphate
  modified_base 12: mod_base = OTHER; note = 2'-O-methyladenosine-3'-phosphate
  modified_base 13: mod_base = OTHER; note = 2'-fluoroadenosine-3'-phosphate
  modified_base 14: mod_base = OTHER; note = 2'-O-methyladenosine-3'-phosphate
  modified_base 15: mod_base = OTHER; note = 2'-fluoroadenosine-3'-phosphate
  modified_base 16: mod_base = OTHER; note = 2'-O-methylguanosine-3'-phosphate
  modified_base 17: mod_base = OTHER; note = 2'-fluoroguanosine-3'-phosphorothioate
  modified_base 18: mod_base = OTHER; note = 2'-O-methylcytidine-3'-phosphorothioate
  modified_base 19: mod_base = OTHER; note = 2'-fluorouridine
ccctcgcgaataaaaggct

SEQ ID NO: 871 - RNA, 19 nt, synthetic construct
  source 1..19: mol_type = other RNA
  modified_base 1: mod_base = OTHER; note = 2'-fluorouridine-3'-phosphorothioate
  modified_base 2: mod_base = OTHER; note = 2'-O-methylcytidine-3'-phosphorothioate
  modified_base 3: mod_base = OTHER; note = 2'-fluoroguanosine-3'-phosphate
  modified_base 4: mod_base = OTHER; note = 2'-O-methylcytidine-3'-phosphate
  modified_base 5: mod_base = OTHER; note = 2'-fluoroguanosine-3'-phosphate
  modified_base 6: mod_base = OTHER; note = 2'-O-methyladenosine-3'-phosphate
  modified_base 7: mod_base = OTHER; note = 2'-fluoroadenosine-3'-phosphate
  modified_base 8: mod_base = OTHER; note = 2'-O-methyluridine-3'-phosphate
  modified_base 9: mod_base = OTHER; note = 2'-fluoroadenosine-3'-phosphate
  modified_base 10: mod_base = OTHER; note = 2'-O-methyladenosine-3'-phosphate
  modified_base 11: mod_base = OTHER; note = 2'-fluoroadenosine-3'-phosphate
  modified_base 12: mod_base = OTHER; note = 2'-O-methyladenosine-3'-phosphate
  modified_base 13: mod_base = OTHER; note = 2'-fluoroguanosine-3'-phosphate
  modified_base 14: mod_base = OTHER; note = 2'-O-methylguanosine-3'-phosphate
  modified_base 15: mod_base = OTHER; note = 2'-fluorocytidine-3'-phosphate
  modified_base 16: mod_base = OTHER; note = 2'-O-methylcytidine-3'-phosphate
  modified_base 17: mod_base = OTHER; note = 2'-fluorocytidine-3'-phosphorothioate
  modified_base 18: mod_base = OTHER; note = 2'-O-methyluridine-3'-phosphorothioate
  modified_base 19: mod_base = OTHER; note = 2'-fluoroadenosine
tcgcgaataaaaggcccta

SEQ ID NO: 872 - RNA, 19 nt, synthetic construct
  source 1..19: mol_type = other RNA
  modified_base 1: mod_base = OTHER; note = 2'-fluorocytidine-3'-phosphorothioate
  modified_base 2: mod_base = OTHER; note = 2'-O-methylguanosine-3'-phosphorothioate
  modified_base 3: mod_base = OTHER; note = 2'-fluorocytidine-3'-phosphate
  modified_base 4: mod_base = OTHER; note = 2'-O-methylguanosine-3'-phosphate
  modified_base 5: mod_base = OTHER; note = 2'-fluoroadenosine-3'-phosphate
  modified_base 6: mod_base = OTHER; note = 2'-O-methyladenosine-3'-phosphate
  modified_base 7: mod_base = OTHER; note = 2'-fluorouridine-3'-phosphate
  modified_base 8: mod_base = OTHER; note = 2'-O-methyladenosine-3'-phosphate
  modified_base 9: mod_base = OTHER; note = 2'-fluoroadenosine-3'-phosphate
  modified_base 10: mod_base = OTHER; note = 2'-O-methyladenosine-3'-phosphate
  modified_base 11: mod_base = OTHER; note = 2'-fluoroadenosine-3'-phosphate
  modified_base 12: mod_base = OTHER; note = 2'-O-methylguanosine-3'-phosphate
  modified_base 13: mod_base = OTHER; note = 2'-fluoroguanosine-3'-phosphate
  modified_base 14: mod_base = OTHER; note = 2'-O-methylcytidine-3'-phosphate
  modified_base 15: mod_base = OTHER; note = 2'-fluorocytidine-3'-phosphate
  modified_base 16: mod_base = OTHER; note = 2'-O-methylcytidine-3'-phosphate
  modified_base 17: mod_base = OTHER; note = 2'-fluorouridine-3'-phosphorothioate
  modified_base 18: mod_base = OTHER; note = 2'-O-methylcytidine-3'-phosphorothioate
  modified_base 19: mod_base = OTHER; note = 2'-fluoroadenosine
cgcgaataaaaggccctca

SEQ ID NO: 873 - RNA, 19 nt, synthetic construct
  source 1..19: mol_type = other RNA
  modified_base 1: mod_base = OTHER; note = 2'-fluoroguanosine-3'-phosphorothioate
  modified_base 2: mod_base = OTHER; note = 2'-O-methylcytidine-3'-phosphorothioate
  modified_base 3: mod_base = OTHER; note = 2'-fluoroguanosine-3'-phosphate
  modified_base 4: mod_base = OTHER; note = 2'-O-methyladenosine-3'-phosphate
  modified_base 5: mod_base = OTHER; note = 2'-fluoroadenosine-3'-phosphate
  modified_base 6: mod_base = OTHER; note = 2'-O-methyluridine-3'-phosphate
  modified_base 7: mod_base = OTHER; note = 2'-fluoroadenosine-3'-phosphate
  modified_base 8: mod_base = OTHER; note = 2'-O-methyladenosine-3'-phosphate
  modified_base 9: mod_base = OTHER; note = 2'-fluoroadenosine-3'-phosphate
  modified_base 10: mod_base = OTHER; note = 2'-O-methyladenosine-3'-phosphate
  modified_base 11: mod_base = OTHER; note = 2'-fluoroguanosine-3'-phosphate
  modified_base 12: mod_base = OTHER; note = 2'-O-methylguanosine-3'-phosphate
  modified_base 13: mod_base = OTHER; note = 2'-fluorocytidine-3'-phosphate
  modified_base 14: mod_base = OTHER; note = 2'-O-methylcytidine-3'-phosphate
  modified_base 15: mod_base = OTHER; note = 2'-fluorocytidine-3'-phosphate
  modified_base 16: mod_base = OTHER; note = 2'-O-methyluridine-3'-phosphate
  modified_base 17: mod_base = OTHER; note = 2'-fluorocytidine-3'-phosphorothioate
  modified_base 18: mod_base = OTHER; note = 2'-O-methylcytidine-3'-phosphorothioate
  modified_base 19: mod_base = OTHER; note = 2'-fluoroadenosine
gcgaataaaaggccctcca

SEQ ID NO: 874 - RNA, 19 nt, synthetic construct
  source 1..19: mol_type = other RNA
  modified_base 1: mod_base = OTHER; note = 2'-fluorocytidine-3'-phosphorothioate
  modified_base 2: mod_base = OTHER; note = 2'-O-methylguanosine-3'-phosphorothioate
  modified_base 3: mod_base = OTHER; note = 2'-fluoroadenosine-3'-phosphate
  modified_base 4: mod_base = OTHER; note = 2'-O-methyladenosine-3'-phosphate
  modified_base 5: mod_base = OTHER; note = 2'-fluorouridine-3'-phosphate
  modified_base 6: mod_base = OTHER; note = 2'-O-methyladenosine-3'-phosphate
  modified_base 7: mod_base = OTHER; note = 2'-fluoroadenosine-3'-phosphate
  modified_base 8: mod_base = OTHER; note = 2'-O-methyladenosine-3'-phosphate
  modified_base 9: mod_base = OTHER; note = 2'-fluoroadenosine-3'-phosphate
  modified_base 10: mod_base = OTHER; note = 2'-O-methylguanosine-3'-phosphate
  modified_base 11: mod_base = OTHER; note = 2'-fluoroguanosine-3'-phosphate
  modified_base 12: mod_base = OTHER; note = 2'-O-methylcytidine-3'-phosphate
  modified_base 13: mod_base = OTHER; note = 2'-fluorocytidine-3'-phosphate
  modified_base 14: mod_base = OTHER; note = 2'-O-methylcytidine-3'-phosphate
  modified_base 15: mod_base = OTHER; note = 2'-fluorouridine-3'-phosphate
  modified_base 16: mod_base = OTHER; note = 2'-O-methylcytidine-3'-phosphate
  modified_base 17: mod_base = OTHER; note = 2'-fluorocytidine-3'-phosphorothioate
  modified_base 18: mod_base = OTHER; note = 2'-O-methyladenosine-3'-phosphorothioate
  modified_base 19: mod_base = OTHER; note = 2'-fluorouridine
cgaataaaaggccctccat

SEQ ID NO: 875 - RNA, 19 nt, synthetic construct
  source 1..19: mol_type = other RNA
  modified_base 1: mod_base = OTHER; note = 2'-fluoroguanosine-3'-phosphorothioate
  modified_base 2: mod_base = OTHER; note = 2'-O-methyladenosine-3'-phosphorothioate
  modified_base 3: mod_base = OTHER; note = 2'-fluoroadenosine-3'-phosphate
  modified_base 4: mod_base = OTHER; note = 2'-O-methyluridine-3'-phosphate
  modified_base 5: mod_base = OTHER; note = 2'-fluoroadenosine-3'-phosphate
  modified_base 6: mod_base = OTHER; note = 2'-O-methyladenosine-3'-phosphate
  modified_base 7: mod_base = OTHER; note = 2'-fluoroadenosine-3'-phosphate
  modified_base 8: mod_base = OTHER; note = 2'-O-methyladenosine-3'-phosphate
  modified_base 9: mod_base = OTHER; note = 2'-fluoroguanosine-3'-phosphate
  modified_base 10: mod_base = OTHER; note = 2'-O-methylguanosine-3'-phosphate
  modified_base 11: mod_base = OTHER; note = 2'-fluorocytidine-3'-phosphate
  modified_base 12: mod_base = OTHER; note = 2'-O-methylcytidine-3'-phosphate
  modified_base 13: mod_base = OTHER; note = 2'-fluorocytidine-3'-phosphate
  modified_base 14: mod_base = OTHER; note = 2'-O-methyluridine-3'-phosphate
  modified_base 15: mod_base = OTHER; note = 2'-fluorocytidine-3'-phosphate
  modified_base 16: mod_base = OTHER; note = 2'-O-methylcytidine-3'-phosphate
  modified_base 17: mod_base = OTHER; note = 2'-fluoroadenosine-3'-phosphorothioate
  modified_base 18: mod_base = OTHER; note = 2'-O-methyluridine-3'-phosphorothioate
  modified_base 19: mod_base = OTHER; note = 2'-fluorouridine
gaataaaaggccctccatt

SEQ ID NO: 876 - RNA, 21 nt, synthetic construct
  source 1..21: mol_type = other RNA
  modified_base 1: mod_base = OTHER; note = 5'-phosphate-2'-O-methyladenosine-3'-phosphorothioate
  modified_base 2: mod_base = OTHER; note = 2'-fluorouridine-3'-phosphorothioate
  modified_base 3: mod_base = OTHER; note = 2'-O-methylcytidine-3'-phosphate
  modified_base 4: mod_base = OTHER; note = 2'-fluoroguanosine-3'-phosphate
  modified_base 5: mod_base = OTHER; note = 2'-O-methylguanosine-3'-phosphate
  modified_base 6: mod_base = OTHER; note = 2'-fluoroadenosine-3'-phosphate
  modified_base 7: mod_base = OTHER; note = 2'-O-methylcytidine-3'-phosphate
  modified_base 8: mod_base = OTHER; note = 2'-fluorocytidine-3'-phosphate
  modified_base 9: mod_base = OTHER; note = 2'-O-methyluridine-3'-phosphate
  modified_base 10: mod_base = OTHER; note = 2'-fluorocytidine-3'-phosphate
  modified_base 11: mod_base = OTHER; note = 2'-O-methylcytidine-3'-phosphate
  modified_base 12: mod_base = OTHER; note = 2'-fluorouridine-3'-phosphate
  modified_base 13: mod_base = OTHER; note = 2'-O-methyluridine-3'-phosphate
  modified_base 14: mod_base = OTHER; note = 2'-fluoroadenosine-3'-phosphate
  modified_base 15: mod_base = OTHER; note = 2'-O-methyladenosine-3'-phosphate
  modified_base 16: mod_base = OTHER; note = 2'-fluoroguanosine-3'-phosphate
  modified_base 17: mod_base = OTHER; note = 2'-O-methylcytidine-3'-phosphate
  modified_base 18: mod_base = OTHER; note = 2'-fluorocytidine-3'-phosphate
  modified_base 19: mod_base = OTHER; note = 2'-O-methyluridine-3'-phosphorothioate
  modified_base 20: mod_base = OTHER; note = 2'-O-methylcytidine-3'-phosphorothioate
  modified_base 21: mod_base = OTHER; note = 2'-O-methyladenosine
atcggacctccttaagcctca

SEQ ID NO: 877 - RNA, 21 nt, synthetic construct
  source 1..21: mol_type = other RNA
  modified_base 1: mod_base = OTHER; note = 5'-phosphate-2'-O-methyladenosine-3'-phosphorothioate
  modified_base 2: mod_base = OTHER; note = 2'-fluoroguanosine-3'-phosphorothioate
  modified_base 3: mod_base = OTHER; note = 2'-O-methyluridine-3'-phosphate
  modified_base 4: mod_base = OTHER; note = 2'-fluorocytidine-3'-phosphate
  modified_base 5: mod_base = OTHER; note = 2'-O-methylguanosine-3'-phosphate
  modified_base 6: mod_base = OTHER; note = 2'-fluoroguanosine-3'-phosphate
  modified_base 7: mod_base = OTHER; note = 2'-O-methyladenosine-3'-phosphate
  modified_base 8: mod_base = OTHER; note = 2'-fluorocytidine-3'-phosphate
  modified_base 9: mod_base = OTHER; note = 2'-O-methylcytidine-3'-phosphate
  modified_base 10: mod_base = OTHER; note = 2'-fluorouridine-3'-phosphate
  modified_base 11: mod_base = OTHER; note = 2'-O-methylcytidine-3'-phosphate
  modified_base 12: mod_base = OTHER; note = 2'-fluorocytidine-3'-phosphate
  modified_base 13: mod_base = OTHER; note = 2'-O-methyluridine-3'-phosphate
  modified_base 14: mod_base = OTHER; note = 2'-fluorouridine-3'-phosphate
  modified_base 15: mod_base = OTHER; note = 2'-O-methyladenosine-3'-phosphate
  modified_base 16: mod_base = OTHER; note = 2'-fluoroadenosine-3'-phosphate
  modified_base 17: mod_base = OTHER; note = 2'-O-methylguanosine-3'-phosphate
  modified_base 18: mod_base = OTHER; note = 2'-fluorocytidine-3'-phosphate
  modified_base 19: mod_base = OTHER; note = 2'-O-methylcytidine-3'-phosphorothioate
  modified_base 20: mod_base = OTHER; note = 2'-O-methyluridine-3'-phosphorothioate
  modified_base 21: mod_base = OTHER; note = 2'-O-methylcytidine
agtcggacctccttaagcctc

SEQ ID NO: 878 - RNA, 21 nt, synthetic construct
  source 1..21: mol_type = other RNA
  modified_base 1: mod_base = OTHER; note = 5'-phosphate-2'-O-methyladenosine-3'-phosphorothioate
  modified_base 2: mod_base = OTHER; note = 2'-fluoroadenosine-3'-phosphorothioate
  modified_base 3: mod_base = OTHER; note = 2'-O-methylguanosine-3'-phosphate
  modified_base 4: mod_base = OTHER; note = 2'-fluorouridine-3'-phosphate
  modified_base 5: mod_base = OTHER; note = 2'-O-methylcytidine-3'-phosphate
  modified_base 6: mod_base = OTHER; note = 2'-fluoroguanosine-3'-phosphate
  modified_base 7: mod_base = OTHER; note = 2'-O-methylguanosine-3'-phosphate
  modified_base 8: mod_base = OTHER; note = 2'-fluoroadenosine-3'-phosphate
  modified_base 9: mod_base = OTHER; note = 2'-O-methylcytidine-3'-phosphate
  modified_base 10: mod_base = OTHER; note = 2'-fluorocytidine-3'-phosphate
  modified_base 11: mod_base = OTHER; note = 2'-O-methyluridine-3'-phosphate
  modified_base 12: mod_base = OTHER; note = 2'-fluorocytidine-3'-phosphate
  modified_base 13: mod_base = OTHER; note = 2'-O-methylcytidine-3'-phosphate
  modified_base 14: mod_base = OTHER; note = 2'-fluorouridine-3'-phosphate
  modified_base 15: mod_base = OTHER; note = 2'-O-methyluridine-3'-phosphate
  modified_base 16: mod_base = OTHER; note = 2'-fluoroadenosine-3'-phosphate
  modified_base 17: mod_base = OTHER; note = 2'-O-methyladenosine-3'-phosphate
  modified_base 18: mod_base = OTHER; note = 2'-fluoroguanosine-3'-phosphate
  modified_base 19: mod_base = OTHER; note = 2'-O-methylcytidine-3'-phosphorothioate
  modified_base 20: mod_base = OTHER; note = 2'-O-methylcytidine-3'-phosphorothioate
  modified_base 21: mod_base = OTHER; note = 2'-O-methyluridine
aagtcggacctccttaagcct

SEQ ID NO: 879 - RNA, 21 nt, synthetic construct
  source 1..21: mol_type = other RNA
  modified_base 1: mod_base = OTHER; note = 5'-phosphate-2'-O-methyluridine-3'-phosphorothioate
  modified_base 2: mod_base = OTHER; note = 2'-fluorocytidine-3'-phosphorothioate
  modified_base 3: mod_base = OTHER; note = 2'-O-methyluridine-3'-phosphate
  modified_base 4: mod_base = OTHER; note = 2'-fluorouridine-3'-phosphate
  modified_base 5: mod_base = OTHER; note = 2'-O-methylcytidine-3'-phosphate
  modified_base 6: mod_base = OTHER; note = 2'-fluoroadenosine-3'-phosphate
  modified_base 7: mod_base = OTHER; note = 2'-O-methylguanosine-3'-phosphate
  modified_base 8: mod_base = OTHER; note = 2'-fluorocytidine-3'-phosphate
  modified_base 9: mod_base = OTHER; note = 2'-O-methyladenosine-3'-phosphate
  modified_base 10: mod_base = OTHER; note = 2'-fluorouridine-3'-phosphate
  modified_base 11: mod_base = OTHER; note = 2'-O-methylguanosine-3'-phosphate
  modified_base 12: mod_base = OTHER; note = 2'-fluorouridine-3'-phosphate
  modified_base 13: mod_base = OTHER; note = 2'-O-methylcytidine-3'-phosphate
  modified_base 14: mod_base = OTHER; note = 2'-fluorocytidine-3'-phosphate
  modified_base 15: mod_base = OTHER; note = 2'-O-methylcytidine-3'-phosphate
  modified_base 16: mod_base = OTHER; note = 2'-fluoroadenosine-3'-phosphate
  modified_base 17: mod_base = OTHER; note = 2'-O-methylcytidine-3'-phosphate
  modified_base 18: mod_base = OTHER; note = 2'-fluorouridine-3'-phosphate
  modified_base 19: mod_base = OTHER; note = 2'-O-methyluridine-3'-phosphorothioate
  modified_base 20: mod_base = OTHER; note = 2'-O-methylguanosine-3'-phosphorothioate
  modified_base 21: mod_base = OTHER; note = 2'-O-methyluridine
tcttcagcatgtcccacttgt

SEQ ID NO: 880 - RNA, 21 nt, synthetic construct
  source 1..21: mol_type = other RNA
  modified_base 1: mod_base = OTHER; note = 5'-phosphate-2'-O-methyladenosine-3'-phosphorothioate
  modified_base 2: mod_base = OTHER; note = 2'-fluorouridine-3'-phosphorothioate
  modified_base 3: mod_base = OTHER; note = 2'-O-methylcytidine-3'-phosphate
  modified_base 4: mod_base = OTHER; note = 2'-fluorouridine-3'-phosphate
  modified_base 5: mod_base = OTHER; note = 2'-O-methyluridine-3'-phosphate
  modified_base 6: mod_base = OTHER; note = 2'-fluorocytidine-3'-phosphate
  modified_base 7: mod_base = OTHER; note = 2'-O-methyladenosine-3'-phosphate
  modified_base 8: mod_base = OTHER; note = 2'-fluoroguanosine-3'-phosphate
  modified_base 9: mod_base = OTHER; note = 2'-O-methylcytidine-3'-phosphate
  modified_base 10: mod_base = OTHER; note = 2'-fluoroadenosine-3'-phosphate
  modified_base 11: mod_base = OTHER; note = 2'-O-methyluridine-3'-phosphate
  modified_base 12: mod_base = OTHER; note = 2'-fluoroguanosine-3'-phosphate
  modified_base 13: mod_base = OTHER; note = 2'-O-methyluridine-3'-phosphate
  modified_base 14: mod_base = OTHER; note = 2'-fluorocytidine-3'-phosphate
  modified_base 15: mod_base = OTHER; note = 2'-O-methylcytidine-3'-phosphate
  modified_base 16: mod_base = OTHER; note = 2'-fluorocytidine-3'-phosphate
  modified_base 17: mod_base = OTHER; note = 2'-O-methyladenosine-3'-phosphate
  modified_base 18: mod_base = OTHER; note = 2'-fluorocytidine-3'-phosphate
  modified_base 19: mod_base = OTHER; note = 2'-O-methyluridine-3'-phosphorothioate
  modified_base 20: mod_base = OTHER; note = 2'-O-methyluridine-3'-phosphorothioate
  modified_base 21: mod_base = OTHER; note = 2'-O-methylguanosine
atcttcagcatgtcccacttg

SEQ ID NO: 881 - RNA, 21 nt, synthetic construct
  source 1..21: mol_type = other RNA
  modified_base 1: mod_base = OTHER; note = 5'-phosphate-2'-O-methyladenosine-3'-phosphorothioate
  modified_base 2: mod_base = OTHER; note = 2'-fluoroguanosine-3'-phosphorothioate
  modified_base 3: mod_base = OTHER; note = 2'-O-methyladenosine-3'-phosphate
  modified_base 4: mod_base = OTHER; note = 2'-fluoroadenosine-3'-phosphate
  modified_base 5: mod_base = OTHER; note = 2'-O-methylguanosine-3'-phosphate
  modified_base 6: mod_base = OTHER; note = 2'-fluorocytidine-3'-phosphate
  modified_base 7: mod_base = OTHER; note = 2'-O-methyladenosine-3'-phosphate
  modified_base 8: mod_base = OTHER; note = 2'-fluorocytidine-3'-phosphate
  modified_base 9: mod_base = OTHER; note = 2'-O-methylguanosine-3'-phosphate
  modified_base 10: mod_base = OTHER; note = 2'-fluoroadenosine-3'-phosphate
  modified_base 11: mod_base = OTHER; note = 2'-O-methylcytidine-3'-phosphate
  modified_base 12: mod_base = OTHER; note = 2'-fluoroadenosine-3'-phosphate
  modified_base 13: mod_base = OTHER; note = 2'-O-methylcytidine-3'-phosphate
  modified_base 14: mod_base = OTHER; note = 2'-fluorocytidine-3'-phosphate
  modified_base 15: mod_base = OTHER; note = 2'-O-methyluridine-3'-phosphate
  modified_base 16: mod_base = OTHER; note = 2'-fluorocytidine-3'-phosphate
  modified_base 17: mod_base = OTHER; note = 2'-O-methylguanosine-3'-phosphate
  modified_base 18: mod_base = OTHER; note = 2'-fluorocytidine-3'-phosphate
  modified_base 19: mod_base = OTHER; note = 2'-O-methylcytidine-3'-phosphorothioate
  modified_base 20: mod_base = OTHER; note = 2'-O-methylcytidine-3'-phosphorothioate
  modified_base 21: mod_base = OTHER; note = 2'-O-methylcytidine
agaagcacgacacctcgcccc

SEQ ID NO: 882 - RNA, 21 nt, synthetic construct
  source 1..21: mol_type = other RNA
  modified_base 1: mod_base = OTHER; note = 5'-phosphate-2'-O-methyladenosine-3'-phosphorothioate
  modified_base 2: mod_base = OTHER; note = 2'-fluoroguanosine-3'-phosphorothioate
  modified_base 3: mod_base = OTHER; note = 2'-O-methyluridine-3'-phosphate
  modified_base 4: mod_base = OTHER; note = 2'-fluorouridine-3'-phosphate
  modified_base 5: mod_base = OTHER; note = 2'-O-methylcytidine-3'-phosphate
  modified_base 6: mod_base = OTHER; note = 2'-fluorouridine-3'-phosphate
  modified_base 7: mod_base = OTHER; note = 2'-O-methylcytidine-3'-phosphate
  modified_base 8: mod_base = OTHER; note = 2'-fluoroadenosine-3'-phosphate
  modified_base 9: mod_base = OTHER; note = 2'-O-methyluridine-3'-phosphate
  modified_base 10: mod_base = OTHER; note = 2'-fluorocytidine-3'-phosphate
  modified_base 11: mod_base = OTHER; note = 2'-O-methylcytidine-3'-phosphate
  modified_base 12: mod_base = OTHER; note = 2'-fluorouridine-3'-phosphate
  modified_base 13: mod_base = OTHER; note = 2'-O-methylguanosine-3'-phosphate
  modified_base 14: mod_base = OTHER; note = 2'-fluoroguanosine-3'-phosphate
  modified_base 15: mod_base = OTHER; note = 2'-O-methyladenosine-3'-phosphate
  modified_base 16: mod_base = OTHER; note = 2'-fluoroadenosine-3'-phosphate
  modified_base 17: mod_base = OTHER; note = 2'-O-methylguanosine-3'-phosphate
  modified_base 18: mod_base = OTHER; note = 2'-fluoroguanosine-3'-phosphate
  modified_base 19: mod_base = OTHER; note = 2'-O-methylcytidine-3'-phosphorothioate
  modified_base 20: mod_base = OTHER; note = 2'-O-methylguanosine-3'-phosphorothioate
  modified_base 21: mod_base = OTHER; note = 2'-O-methyladenosine
agttctcatcctggaaggcga

SEQ ID NO: 883 - RNA, 21 nt, synthetic construct
  source 1..21: mol_type = other RNA
  modified_base 1: mod_base = OTHER; note = 5'-phosphate-2'-O-methyluridine-3'-phosphorothioate
  modified_base 2: mod_base = OTHER; note = 2'-fluoroadenosine-3'-phosphorothioate
  modified_base 3: mod_base = OTHER; note = 2'-O-methylguanosine-3'-phosphate
  modified_base 4: mod_base = OTHER; note = 2'-fluorouridine-3'-phosphate
  modified_base 5: mod_base = OTHER; note = 2'-O-methyluridine-3'-phosphate
  modified_base 6: mod_base = OTHER; note = 2'-fluorocytidine-3'-phosphate
  modified_base 7: mod_base = OTHER; note = 2'-O-methyluridine-3'-phosphate
  modified_base 8: mod_base = OTHER; note = 2'-fluorocytidine-3'-phosphate
  modified_base 9: mod_base = OTHER; note = 2'-O-methyladenosine-3'-phosphate
  modified_base 10: mod_base = OTHER; note = 2'-fluorouridine-3'-phosphate
  modified_base 11: mod_base = OTHER; note = 2'-O-methylcytidine-3'-phosphate
  modified_base 12: mod_base = OTHER; note = 2'-fluorocytidine-3'-phosphate
  modified_base 13: mod_base = OTHER; note = 2'-O-methyluridine-3'-phosphate
  modified_base 14: mod_base = OTHER; note = 2'-fluoroguanosine-3'-phosphate
  modified_base 15: mod_base = OTHER; note = 2'-O-methylguanosine-3'-phosphate
  modified_base 16: mod_base = OTHER; note = 2'-fluoroadenosine-3'-phosphate
  modified_base 17: mod_base = OTHER; note = 2'-O-methyladenosine-3'-phosphate
  modified_base 18: mod_base = OTHER; note = 2'-fluoroguanosine-3'-phosphate
  modified_base 19: mod_base = OTHER; note = 2'-O-methylguanosine-3'-phosphorothioate
  modified_base 20: mod_base = OTHER; note = 2'-O-methylcytidine-3'-phosphorothioate
  modified_base 21: mod_base = OTHER; note = 2'-O-methylguanosine
tagttctcatcctggaaggcg

SEQ ID NO: 884 - RNA, 21 nt, synthetic construct
  source 1..21: mol_type = other RNA
  modified_base 1: mod_base = OTHER; note = 5'-phosphate-2'-O-methyladenosine-3'-phosphorothioate
  modified_base 2: mod_base = OTHER; note = 2'-fluorouridine-3'-phosphorothioate
  modified_base 3: mod_base = OTHER; note = 2'-O-methyladenosine-3'-phosphate
  modified_base 4: mod_base = OTHER; note = 2'-fluoroguanosine-3'-phosphate
  modified_base 5: mod_base = OTHER; note = 2'-O-methyluridine-3'-phosphate
  modified_base 6: mod_base = OTHER; note = 2'-fluorouridine-3'-phosphate
  modified_base 7: mod_base = OTHER; note = 2'-O-methylcytidine-3'-phosphate
  modified_base 8: mod_base = OTHER; note = 2'-fluorouridine-3'-phosphate
  modified_base 9: mod_base = OTHER; note = 2'-O-methylcytidine-3'-phosphate
  modified_base 10: mod_base = OTHER; note = 2'-fluoroadenosine-3'-phosphate
  modified_base 11: mod_base = OTHER; note = 2'-O-methyluridine-3'-phosphate
  modified_base 12: mod_base = OTHER; note = 2'-fluorocytidine-3'-phosphate
  modified_base 13: mod_base = OTHER; note = 2'-O-methylcytidine-3'-phosphate
  modified_base 14: mod_base = OTHER; note = 2'-fluorouridine-3'-phosphate
  modified_base 15: mod_base = OTHER; note = 2'-O-methylguanosine-3'-phosphate
  modified_base 16: mod_base = OTHER; note = 2'-fluoroguanosine-3'-phosphate
  modified_base 17: mod_base = OTHER; note = 2'-O-methyladenosine-3'-phosphate
  modified_base 18: mod_base = OTHER; note = 2'-fluoroadenosine-3'-phosphate
  modified_base 19: mod_base = OTHER; note = 2'-O-methylguanosine-3'-phosphorothioate
  modified_base 20: mod_base = OTHER; note = 2'-O-methylguanosine-3'-phosphorothioate
  modified_base 21: mod_base = OTHER; note = 2'-O-methylcytidine
atagttctcatcctggaaggc

SEQ ID NO: 885 - RNA, 21 nt, synthetic construct
  source 1..21: mol_type = other RNA
  modified_base 1: mod_base = OTHER; note = 5'-phosphate-2'-O-methyluridine-3'-phosphorothioate
  modified_base 2: mod_base = OTHER; note = 2'-fluoroadenosine-3'-phosphorothioate
  modified_base 3: mod_base = OTHER; note = 2'-O-methylguanosine-3'-phosphate
  modified_base 4: mod_base = OTHER; note = 2'-fluoroguanosine-3'-phosphate
  modified_base 5: mod_base = OTHER; note = 2'-O-methyluridine-3'-phosphate
  modified_base 6: mod_base = OTHER; note = 2'-fluoroadenosine-3'-phosphate
  modified_base 7: mod_base = OTHER; note = 2'-O-methylguanosine-3'-phosphate
  modified_base 8: mod_base = OTHER; note = 2'-fluorouridine-3'-phosphate
  modified_base 9: mod_base = OTHER; note = 2'-O-methyluridine-3'-phosphate
  modified_base 10: mod_base = OTHER; note = 2'-fluorocytidine-3'-phosphate
  modified_base 11: mod_base = OTHER; note = 2'-O-methyluridine-3'-phosphate
  modified_base 12: mod_base = OTHER; note = 2'-fluorocytidine-3'-phosphate
  modified_base 13: mod_base = OTHER; note = 2'-O-methyladenosine-3'-phosphate
  modified_base 14: mod_base = OTHER; note = 2'-fluorouridine-3'-phosphate
  modified_base 15: mod_base = OTHER; note = 2'-O-methylcytidine-3'-phosphate
  modified_base 16: mod_base = OTHER; note = 2'-fluorocytidine-3'-phosphate
  modified_base 17: mod_base = OTHER; note = 2'-O-methyluridine-3'-phosphate
  modified_base 18: mod_base = OTHER; note = 2'-fluoroguanosine-3'-phosphate
  modified_base 19: mod_base = OTHER; note = 2'-O-methylguanosine-3'-phosphorothioate
  modified_base 20: mod_base = OTHER; note = 2'-O-methyladenosine-3'-phosphorothioate
  modified_base 21: mod_base = OTHER; note = 2'-O-methyladenosine
taggtagttctcatcctggaa

SEQ ID NO: 886 - RNA, 21 nt, synthetic construct
  source 1..21: mol_type = other RNA
  modified_base 1: mod_base = OTHER; note = 5'-phosphate-2'-O-methyladenosine-3'-phosphorothioate
  modified_base 2: mod_base = OTHER; note = 2'-fluorocytidine-3'-phosphorothioate
  modified_base 3: mod_base = OTHER; note = 2'-O-methyladenosine-3'-phosphate
  modified_base 4: mod_base = OTHER; note = 2'-fluoroguanosine-3'-phosphate
  modified_base 5: mod_base = OTHER; note = 2'-O-methylguanosine-3'-phosphate
  modified_base 6: mod_base = OTHER; note = 2'-fluorouridine-3'-phosphate
  modified_base 7: mod_base = OTHER; note = 2'-O-methyladenosine-3'-phosphate
  modified_base 8: mod_base = OTHER; note = 2'-fluoroguanosine-3'-phosphate
  modified_base 9: mod_base = OTHER; note = 2'-O-methyluridine-3'-phosphate
  modified_base 10: mod_base = OTHER; note = 2'-fluorouridine-3'-phosphate
  modified_base 11: mod_base = OTHER; note = 2'-O-methylcytidine-3'-phosphate
  modified_base 12: mod_base = OTHER; note = 2'-fluorouridine-3'-phosphate
  modified_base 13: mod_base = OTHER; note = 2'-O-methylcytidine-3'-phosphate
  modified_base 14: mod_base = OTHER; note = 2'-fluoroadenosine-3'-phosphate
  modified_base 15: mod_base = OTHER; note = 2'-O-methyluridine-3'-phosphate
  modified_base 16: mod_base = OTHER; note = 2'-fluorocytidine-3'-phosphate
  modified_base 17: mod_base = OTHER; note = 2'-O-methylcytidine-3'-phosphate
  modified_base 18: mod_base = OTHER; note = 2'-fluorouridine-3'-phosphate
  modified_base 19: mod_base = OTHER; note = 2'-O-methylguanosine-3'-phosphorothioate
  modified_base 20: mod_base = OTHER; note = 2'-O-methylguanosine-3'-phosphorothioate
  modified_base 21: mod_base = OTHER; note = 2'-O-methyladenosine
acaggtagttctcatcctgga

SEQ ID NO: 887 - RNA, 21 nt, synthetic construct
  source 1..21: mol_type = other RNA
  modified_base 1: mod_base = OTHER; note = 5'-phosphate-2'-O-methyluridine-3'-phosphorothioate
  modified_base 2: mod_base = OTHER; note = 2'-fluoroadenosine-3'-phosphorothioate
  modified_base 3: mod_base = OTHER; note = 2'-O-methylcytidine-3'-phosphate
  modified_base 4: mod_base = OTHER; note = 2'-fluoroadenosine-3'-phosphate
  modified_base 5: mod_base = OTHER; note = 2'-O-methylguanosine-3'-phosphate
  modified_base 6: mod_base = OTHER; note = 2'-fluoroguanosine-3'-phosphate
  modified_base 7: mod_base = OTHER; note = 2'-O-methyluridine-3'-phosphate
  modified_base 8: mod_base = OTHER; note = 2'-fluoroadenosine-3'-phosphate
  modified_base 9: mod_base = OTHER; note = 2'-O-methylguanosine-3'-phosphate
  modified_base 10: mod_base = OTHER; note = 2'-fluorouridine-3'-phosphate
  modified_base 11: mod_base = OTHER; note = 2'-O-methyluridine-3'-phosphate
  modified_base 12: mod_base = OTHER; note = 2'-fluorocytidine-3'-phosphate
  modified_base 13: mod_base = OTHER; note = 2'-O-methyluridine-3'-phosphate
  modified_base 14: mod_base = OTHER; note = 2'-fluorocytidine-3'-phosphate
  modified_base 15: mod_base = OTHER; note = 2'-O-methyladenosine-3'-phosphate
  modified_base 16: mod_base = OTHER; note = 2'-fluorouridine-3'-phosphate
  modified_base 17: mod_base = OTHER; note = 2'-O-methylcytidine-3'-phosphate
  modified_base 18: mod_base = OTHER; note = 2'-fluorocytidine-3'-phosphate
  modified_base 19: mod_base = OTHER; note = 2'-O-methyluridine-3'-phosphorothioate
  modified_base 20: mod_base = OTHER; note = 2'-O-methylguanosine-3'-phosphorothioate
  modified_base 21: mod_base = OTHER; note = 2'-O-methylguanosine
tacaggtagttctcatcctgg

SEQ ID NO: 888 - RNA, 21 nt, synthetic construct
  source 1..21: mol_type = other RNA
  modified_base 1: mod_base = OTHER; note = 5'-phosphate-2'-O-methyladenosine-3'-phosphorothioate
  modified_base 2: mod_base = OTHER; note = 2'-fluorouridine-3'-phosphorothioate
  modified_base 3: mod_base = OTHER; note = 2'-O-methyladenosine-3'-phosphate
  modified_base 4: mod_base = OTHER; note = 2'-fluorocytidine-3'-phosphate
  modified_base 5: mod_base = OTHER; note = 2'-O-methyladenosine-3'-phosphate
  modified_base 6: mod_base = OTHER; note = 2'-fluoroguanosine-3'-phosphate
  modified_base 7: mod_base = OTHER; note = 2'-O-methylguanosine-3'-phosphate
  modified_base 8: mod_base = OTHER; note = 2'-fluorouridine-3'-phosphate
  modified_base 9: mod_base = OTHER; note = 2'-O-methyladenosine-3'-phosphate
  modified_base 10: mod_base = OTHER; note = 2'-fluoroguanosine-3'-phosphate
  modified_base 11: mod_base = OTHER; note = 2'-O-methyluridine-3'-phosphate
  modified_base 12: mod_base = OTHER; note = 2'-fluorouridine-3'-phosphate
  modified_base 13: mod_base = OTHER; note = 2'-O-methylcytidine-3'-phosphate
  modified_base 14: mod_base = OTHER; note = 2'-fluorouridine-3'-phosphate
  modified_base 15: mod_base = OTHER; note = 2'-O-methylcytidine-3'-phosphate
  modified_base 16: mod_base = OTHER; note = 2'-fluoroadenosine-3'-phosphate
  modified_base 17: mod_base = OTHER; note = 2'-O-methyluridine-3'-phosphate
  modified_base 18: mod_base = OTHER; note = 2'-fluorocytidine-3'-phosphate
  modified_base 19: mod_base = OTHER; note = 2'-O-methylcytidine-3'-phosphorothioate
  modified_base 20: mod_base = OTHER; note = 2'-O-methyluridine-3'-phosphorothioate
  modified_base 21: mod_base = OTHER; note = 2'-O-methylguanosine
atacaggtagttctcatcctg

SEQ ID NO: 889 - RNA, 21 nt, synthetic construct
  source 1..21: mol_type = other RNA
  modified_base 1: mod_base = OTHER; note = 5'-phosphate-2'-O-methyladenosine-3'-phosphorothioate
  modified_base 2: mod_base = OTHER; note = 2'-fluorouridine-3'-phosphorothioate
  modified_base 3: mod_base = OTHER; note = 2'-O-methylguanosine-3'-phosphate
  modified_base 4: mod_base = OTHER; note = 2'-fluoroadenosine-3'-phosphate
  modified_base 5: mod_base = OTHER; note = 2'-O-methylcytidine-3'-phosphate
  modified_base 6: mod_base = OTHER; note = 2'-fluorocytidine-3'-phosphate
  modified_base 7: mod_base = OTHER; note = 2'-O-methyladenosine-3'-phosphate
  modified_base 8: mod_base = OTHER; note = 2'-fluoroguanosine-3'-phosphate
  modified_base 9: mod_base = OTHER; note = 2'-O-methylguanosine-3'-phosphate
  modified_base 10: mod_base = OTHER; note = 2'-fluorouridine-3'-phosphate
  modified_base 11: mod_base = OTHER; note = 2'-O-methyladenosine-3'-phosphate
  modified_base 12: mod_base = OTHER; note = 2'-fluorocytidine-3'-phosphate
  modified_base 13: mod_base = OTHER; note = 2'-O-methyladenosine-3'-phosphate
  modified_base 14: mod_base = OTHER; note = 2'-fluoroguanosine-3'-phosphate
  modified_base 15: mod_base = OTHER; note = 2'-O-methylguanosine-3'-phosphate
  modified_base 16: mod_base = OTHER; note = 2'-fluorouridine-3'-phosphate
  modified_base 17: mod_base = OTHER; note = 2'-O-methyladenosine-3'-phosphate
  modified_base 18: mod_base = OTHER; note = 2'-fluoroguanosine-3'-phosphate
  modified_base 19: mod_base = OTHER; note = 2'-O-methyluridine-3'-phosphorothioate
  modified_base 20: mod_base = OTHER; note = 2'-O-methyluridine-3'-phosphorothioate
  modified_base 21: mod_base = OTHER; note = 2'-O-methylcytidine
atgaccaggtacaggtagttc

SEQ ID NO: 890 - RNA, 21 nt, synthetic construct
  source 1..21: mol_type = other RNA
  modified_base 1: mod_base = OTHER; note = 5'-phosphate-2'-O-methyladenosine-3'-phosphorothioate
  modified_base 2: mod_base = OTHER; note = 2'-fluoroadenosine-3'-phosphorothioate
  modified_base 3: mod_base = OTHER; note = 2'-O-methyluridine-3'-phosphate
  modified_base 4: mod_base = OTHER; note = 2'-fluoroguanosine-3'-phosphate
  modified_base 5: mod_base = OTHER; note = 2'-O-methyladenosine-3'-phosphate
  modified_base 6: mod_base = OTHER; note = 2'-fluorocytidine-3'-phosphate
  modified_base 7: mod_base = OTHER; note = 2'-O-methylcytidine-3'-phosphate
  modified_base 8: mod_base = OTHER; note = 2'-fluoroadenosine-3'-phosphate
  modified_base 9: mod_base = OTHER; note = 2'-O-methylguanosine-3'-phosphate
  modified_base 10: mod_base = OTHER; note = 2'-fluoroguanosine-3'-phosphate
  modified_base 11: mod_base = OTHER; note = 2'-O-methyluridine-3'-phosphate
  modified_base 12: mod_base = OTHER; note = 2'-fluoroadenosine-3'-phosphate
  modified_base 13: mod_base = OTHER; note = 2'-O-methylcytidine-3'-phosphate
  modified_base 14: mod_base = OTHER; note = 2'-fluoroadenosine-3'-phosphate
  modified_base 15: mod_base = OTHER; note = 2'-O-methylguanosine-3'-phosphate
  modified_base 16: mod_base = OTHER; note = 2'-fluoroguanosine-3'-phosphate
  modified_base 17: mod_base = OTHER; note = 2'-O-methyluridine-3'-phosphate
  modified_base 18: mod_base = OTHER; note = 2'-fluoroadenosine-3'-phosphate
  modified_base 19: mod_base = OTHER; note = 2'-O-methylguanosine-3'-phosphorothioate
  modified_base 20: mod_base = OTHER; note = 2'-O-methyluridine-3'-phosphorothioate
  modified_base 21: mod_base = OTHER; note = 2'-O-methyluridine
aatgaccaggtacaggtagtt

SEQ ID NO: 891 - RNA, 21 nt, synthetic construct
  source 1..21: mol_type = other RNA
  modified_base 1: mod_base = OTHER; note = 5'-phosphate-2'-O-methyladenosine-3'-phosphorothioate
  modified_base 2: mod_base = OTHER; note = 2'-fluorocytidine-3'-phosphorothioate
  modified_base 3: mod_base = OTHER; note = 2'-O-methyladenosine-3'-phosphate
  modified_base 4: mod_base = OTHER; note = 2'-fluorouridine-3'-phosphate
  modified_base 5: mod_base = OTHER; note = 2'-O-methylguanosine-3'-phosphate
  modified_base 6: mod_base = OTHER; note = 2'-fluoroadenosine-3'-phosphate
  modified_base 7: mod_base = OTHER; note = 2'-O-methylcytidine-3'-phosphate
  modified_base 8: mod_base = OTHER; note = 2'-fluorocytidine-3'-phosphate
  modified_base 9: mod_base = OTHER; note = 2'-O-methyladenosine-3'-phosphate
  modified_base 10: mod_base = OTHER; note = 2'-fluoroguanosine-3'-phosphate
  modified_base 11: mod_base = OTHER; note = 2'-O-methylguanosine-3'-phosphate
  modified_base 12: mod_base = OTHER; note = 2'-fluorouridine-3'-phosphate
  modified_base 13: mod_base = OTHER; note = 2'-O-methyladenosine-3'-phosphate
  modified_base 14: mod_base = OTHER; note = 2'-fluorocytidine-3'-phosphate
  modified_base 15: mod_base = OTHER; note = 2'-O-methyladenosine-3'-phosphate
  modified_base 16: mod_base = OTHER; note = 2'-fluoroguanosine-3'-phosphate
  modified_base 17: mod_base = OTHER; note = 2'-O-methylguanosine-3'-phosphate
  modified_base 18: mod_base = OTHER; note = 2'-fluorouridine-3'-phosphate
  modified_base 19: mod_base = OTHER; note = 2'-O-methyladenosine-3'-phosphorothioate
  modified_base 20: mod_base = OTHER; note = 2'-O-methylguanosine-3'-phosphorothioate
  modified_base 21: mod_base = OTHER; note = 2'-O-methyluridine
acatgaccaggtacaggtagt

SEQ ID NO: 892 - RNA, 21 nt, synthetic construct
  source 1..21: mol_type = other RNA
  modified_base 1: mod_base = OTHER; note = 5'-phosphate-2'-O-methyluridine-3'-phosphorothioate
  modified_base 2: mod_base = OTHER; note = 2'-fluorocytidine-3'-phosphorothioate
  modified_base 3: mod_base = OTHER; note = 2'-O-methylcytidine-3'-phosphate
  modified_base 4: mod_base = OTHER; note = 2'-fluoroadenosine-3'-phosphate
  modified_base 5: mod_base = OTHER; note = 2'-O-methyluridine-3'-phosphate
  modified_base 6: mod_base = OTHER; note = 2'-fluoroguanosine-3'-phosphate
  modified_base 7: mod_base = OTHER; note = 2'-O-methyladenosine-3'-phosphate
  modified_base 8: mod_base = OTHER; note = 2'-fluorocytidine-3'-phosphate
  modified_base 9: mod_base = OTHER; note = 2'-O-methylcytidine-3'-phosphate
  modified_base 10: mod_base = OTHER; note = 2'-fluoroadenosine-3'-phosphate
  modified_base 11: mod_base = OTHER; note = 2'-O-methylguanosine-3'-phosphate
  modified_base 12: mod_base = OTHER; note = 2'-fluoroguanosine-3'-phosphate
  modified_base 13: mod_base = OTHER; note = 2'-O-methyluridine-3'-phosphate
  modified_base 14: mod_base = OTHER; note = 2'-fluoroadenosine-3'-phosphate
  modified_base 15: mod_base = OTHER; note = 2'-O-methylcytidine-3'-phosphate
  modified_base 16: mod_base = OTHER; note = 2'-fluoroadenosine-3'-phosphate
  modified_base 17: mod_base = OTHER; note = 2'-O-methylguanosine-3'-phosphate
  modified_base 18: mod_base = OTHER; note = 2'-fluoroguanosine-3'-phosphate
  modified_base 19: mod_base = OTHER; note = 2'-O-methyluridine-3'-phosphorothioate
  modified_base 20: mod_base = OTHER; note = 2'-O-methyladenosine-3'-phosphorothioate
  modified_base 21: mod_base = OTHER; note = 2'-O-methylguanosine
tccatgaccaggtacaggtag

SEQ ID NO: 893 - RNA, 21 nt, synthetic construct
  source 1..21: mol_type = other RNA
  modified_base 1: mod_base = OTHER; note = 5'-phosphate-2'-O-methyladenosine-3'-phosphorothioate
  modified_base 2: mod_base = OTHER; note = 2'-fluorouridine-3'-phosphorothioate
  modified_base 3: mod_base = OTHER; note = 2'-O-methylcytidine-3'-phosphate
  modified_base 4: mod_base = OTHER; note = 2'-fluorocytidine-3'-phosphate
  modified_base 5: mod_base = OTHER; note = 2'-O-methylcytidine-3'-phosphate
  modified_base 6: mod_base = OTHER; note = 2'-fluorocytidine-3'-phosphate
  modified_base 7: mod_base = OTHER; note = 2'-O-methyladenosine-3'-phosphate
  modified_base 8: mod_base = OTHER; note = 2'-fluoroadenosine-3'-phosphate
  modified_base 9: mod_base = OTHER; note = 2'-O-methyladenosine-3'-phosphate
  modified_base 10: mod_base = OTHER; note = 2'-fluorocytidine-3'-phosphate
  modified_base 11: mod_base = OTHER; note = 2'-O-methyluridine-3'-phosphate
  modified_base 12: mod_base = OTHER; note = 2'-fluorouridine-3'-phosphate
  modified_base 13: mod_base = OTHER; note = 2'-O-methylguanosine-3'-phosphate
  modified_base 14: mod_base = OTHER; note = 2'-fluorocytidine-3'-phosphate
  modified_base 15: mod_base = OTHER; note = 2'-O-methyluridine-3'-phosphate
  modified_base 16: mod_base = OTHER; note = 2'-fluorocytidine-3'-phosphate
  modified_base 17: mod_base = OTHER; note = 2'-O-methyladenosine-3'-phosphate
  modified_base 18: mod_base = OTHER; note = 2'-fluoroguanosine-3'-phosphate
  modified_base 19: mod_base = OTHER; note = 2'-O-methylcytidine-3'-phosphorothioate
  modified_base 20: mod_base = OTHER; note = 2'-O-methyladenosine-3'-phosphorothioate
  modified_base 21: mod_base = OTHER; note = 2'-O-methylguanosine
atccccaaacttgctcagcag

SEQ ID NO: 894 - RNA, 21 nt, synthetic construct
  source 1..21: mol_type = other RNA
  modified_base 1: mod_base = OTHER; note = 5'-phosphate-2'-O-methyladenosine-3'-phosphorothioate
  modified_base 2: mod_base = OTHER; note = 2'-fluorouridine-3'-phosphorothioate
  modified_base 3: mod_base = OTHER; note = 2'-O-methylcytidine-3'-phosphate
  modified_base 4: mod_base = OTHER; note = 2'-fluorocytidine-3'-phosphate
  modified_base 5: mod_base = OTHER; note = 2'-O-methylguanosine-3'-phosphate
  modified_base 6: mod_base = OTHER; note = 2'-fluorocytidine-3'-phosphate
  modified_base 7: mod_base = OTHER; note = 2'-O-methyluridine-3'-phosphate
  modified_base 8: mod_base = OTHER; note = 2'-fluorocytidine-3'-phosphate
  modified_base 9: mod_base = OTHER; note = 2'-O-methylcytidine-3'-phosphate
  modified_base 10: mod_base = OTHER; note = 2'-fluorocytidine-3'-phosphate
  modified_base 11: mod_base = OTHER; note = 2'-O-methylcytidine-3'-phosphate
  modified_base 12: mod_base = OTHER; note = 2'-fluoroadenosine-3'-phosphate
  modified_base 13: mod_base = OTHER; note = 2'-O-methyladenosine-3'-phosphate
  modified_base 14: mod_base = OTHER; note = 2'-fluoroadenosine-3'-phosphate
  modified_base 15: mod_base = OTHER; note = 2'-O-methylcytidine-3'-phosphate
  modified_base 16: mod_base = OTHER; note = 2'-fluorouridine-3'-phosphate
  modified_base 17: mod_base = OTHER; note = 2'-O-methyluridine-3'-phosphate
  modified_base 18: mod_base = OTHER; note = 2'-fluoroguanosine-3'-phosphate
  modified_base 19: mod_base = OTHER; note = 2'-O-methylcytidine-3'-phosphorothioate
  modified_base 20: mod_base = OTHER; note = 2'-O-methyluridine-3'-phosphorothioate
  modified_base 21: mod_base = OTHER; note = 2'-O-methylcytidine
atccgctccccaaacttgctc

SEQ ID NO: 895 - RNA, 21 nt, synthetic construct
  source 1..21: mol_type = other RNA
  modified_base 1: mod_base = OTHER; note = 5'-phosphate-2'-O-methyladenosine-3'-phosphorothioate
  modified_base 2: mod_base = OTHER; note = 2'-fluorouridine-3'-phosphorothioate
  modified_base 3: mod_base = OTHER; note = 2'-O-methyladenosine-3'-phosphate
  modified_base 4: mod_base = OTHER; note = 2'-fluorouridine-3'-phosphate
  modified_base 5: mod_base = OTHER; note = 2'-O-methylguanosine-3'-phosphate
  modified_base 6: mod_base = OTHER; note = 2'-fluoroguanosine-3'-phosphate
  modified_base 7: mod_base = OTHER; note = 2'-O-methylcytidine-3'-phosphate
  modified_base 8: mod_base = OTHER; note = 2'-fluorocytidine-3'-phosphate
  modified_base 9: mod_base = OTHER; note = 2'-O-methyladenosine-3'-phosphate
  modified_base 10: mod_base = OTHER; note = 2'-fluorouridine-3'-phosphate
  modified_base 11: mod_base = OTHER; note = 2'-O-methylguanosine-3'-phosphate
  modified_base 12: mod_base = OTHER; note = 2'-fluoroadenosine-3'-phosphate
  modified_base 13: mod_base = OTHER; note = 2'-O-methylcytidine-3'-phosphate
  modified_base 14: mod_base = OTHER; note = 2'-fluoroadenosine-3'-phosphate
  modified_base 15: mod_base = OTHER; note = 2'-O-methyladenosine-3'-phosphate
  modified_base 16: mod_base = OTHER; note = 2'-fluorouridine-3'-phosphate
  modified_base 17: mod_base = OTHER; note = 2'-O-methylcytidine-3'-phosphate
  modified_base 18: mod_base = OTHER; note = 2'-fluorouridine-3'-phosphate
  modified_base 19: mod_base = OTHER; note = 2'-O-methylcytidine-3'-phosphorothioate
  modified_base 20: mod_base = OTHER; note = 2'-O-methylcytidine-3'-phosphorothioate
  modified_base 21: mod_base = OTHER; note = 2'-O-methylguanosine
atatggccatgacaatctccg

SEQ ID NO: 896 - RNA, 21 nt, synthetic construct
  source 1..21: mol_type = other RNA
  modified_base 1: mod_base = OTHER; note = 5'-phosphate-2'-O-methyluridine-3'-phosphorothioate
  modified_base 2: mod_base = OTHER; note = 2'-fluorocytidine-3'-phosphorothioate
  modified_base 3: mod_base = OTHER; note = 2'-O-methyluridine-3'-phosphate
  modified_base 4: mod_base = OTHER; note = 2'-fluoroadenosine-3'-phosphate
  modified_base 5: mod_base = OTHER; note = 2'-O-methyluridine-3'-phosphate
  modified_base 6: mod_base = OTHER; note = 2'-fluoroguanosine-3'-phosphate
  modified_base 7: mod_base = OTHER; note = 2'-O-methylguanosine-3'-phosphate
  modified_base 8: mod_base = OTHER; note = 2'-fluorocytidine-3'-phosphate
  modified_base 9: mod_base = OTHER; note = 2'-O-methylcytidine-3'-phosphate
  modified_base 10: mod_base = OTHER; note = 2'-fluoroadenosine-3'-phosphate
  modified_base 11: mod_base = OTHER; note = 2'-O-methyluridine-3'-phosphate
  modified_base 12: mod_base = OTHER; note = 2'-fluoroguanosine-3'-phosphate
  modified_base 13: mod_base = OTHER; note = 2'-O-methyladenosine-3'-phosphate
  modified_base 14: mod_base = OTHER; note = 2'-fluorocytidine-3'-phosphate
  modified_base 15: mod_base = OTHER; note = 2'-O-methyladenosine-3'-phosphate
  modified_base 16: mod_base = OTHER; note = 2'-fluoroadenosine-3'-phosphate
  modified_base 17: mod_base = OTHER; note = 2'-O-methyluridine-3'-phosphate
  modified_base 18: mod_base = OTHER; note = 2'-fluorocytidine-3'-phosphate
  modified_base 19: mod_base = OTHER; note = 2'-O-methyluridine-3'-phosphorothioate
  modified_base 20: mod_base = OTHER; note = 2'-O-methylcytidine-3'-phosphorothioate
  modified_base 21: mod_base = OTHER; note = 2'-O-methylcytidine
tctatggccatgacaatctcc

SEQ ID NO: 897 - RNA, 21 nt, synthetic construct
  source 1..21: mol_type = other RNA
  modified_base 1: mod_base = OTHER; note = 5'-phosphate-2'-O-methyluridine-3'-phosphorothioate
  modified_base 2: mod_base = OTHER; note = 2'-fluoroguanosine-3'-phosphorothioate
  modified_base 3: mod_base = OTHER; note = 2'-O-methyluridine-3'-phosphate
  modified_base 4: mod_base = OTHER; note = 2'-fluorocytidine-3'-phosphate
  modified_base 5: mod_base = OTHER; note = 2'-O-methylcytidine-3'-phosphate
  modified_base 6: mod_base = OTHER; note = 2'-fluorocytidine-3'-phosphate
  modified_base 7: mod_base = OTHER; note = 2'-O-methyluridine-3'-phosphate
  modified_base 8: mod_base = OTHER; note = 2'-fluoroguanosine-3'-phosphate
  modified_base 9: mod_base = OTHER; note = 2'-O-methyluridine-3'-phosphate
  modified_base 10: mod_base = OTHER; note = 2'-fluoroguanosine-3'-phosphate
  modified_base 11: mod_base = OTHER; note = 2'-O-methylcytidine-3'-phosphate
  modified_base 12: mod_base = OTHER; note = 2'-fluoroadenosine-3'-phosphate
  modified_base 13: mod_base = OTHER; note = 2'-O-methylcytidine-3'-phosphate
  modified_base 14: mod_base = OTHER; note = 2'-fluoroguanosine-3'-phosphate
  modified_base 15: mod_base = OTHER; note = 2'-O-methyluridine-3'-phosphate
  modified_base 16: mod_base = OTHER; note = 2'-fluoroadenosine-3'-phosphate
  modified_base 17: mod_base = OTHER; note = 2'-O-methylguanosine-3'-phosphate
  modified_base 18: mod_base = OTHER; note = 2'-fluorocytidine-3'-phosphate
  modified_base 19: mod_base = OTHER; note = 2'-O-methylcytidine-3'-phosphorothioate
  modified_base 20: mod_base = OTHER; note = 2'-O-methyladenosine-3'-phosphorothioate
  modified_base 21: mod_base = OTHER; note = 2'-O-methyladenosine
tgtccctgtgcacgtagccaa

SEQ ID NO: 898 - RNA, 21 nt, synthetic construct
  source 1..21: mol_type = other RNA
  modified_base 1: mod_base = OTHER; note = 5'-phosphate-2'-O-methyladenosine-3'-phosphorothioate
  modified_base 2: mod_base = OTHER; note = 2'-fluorouridine-3'-phosphorothioate
  modified_base 3: mod_base = OTHER; note = 2'-O-methylguanosine-3'-phosphate
  modified_base 4: mod_base = OTHER; note = 2'-fluorouridine-3'-phosphate
  modified_base 5: mod_base = OTHER; note = 2'-O-methylcytidine-3'-phosphate
  modified_base 6: mod_base = OTHER; note = 2'-fluorocytidine-3'-phosphate
  modified_base 7: mod_base = OTHER; note = 2'-O-methylcytidine-3'-phosphate
  modified_base 8: mod_base = OTHER; note = 2'-fluorouridine-3'-phosphate
  modified_base 9: mod_base = OTHER; note = 2'-O-methylguanosine-3'-phosphate
  modified_base 10: mod_base = OTHER; note = 2'-fluorouridine-3'-phosphate
  modified_base 11: mod_base = OTHER; note = 2'-O-methylguanosine-3'-phosphate
  modified_base 12: mod_base = OTHER; note = 2'-fluorocytidine-3'-phosphate
  modified_base 13: mod_base = OTHER; note = 2'-O-methyladenosine-3'-phosphate
  modified_base 14: mod_base = OTHER; note = 2'-fluorocytidine-3'-phosphate
  modified_base 15: mod_base = OTHER; note = 2'-O-methylguanosine-3'-phosphate
  modified_base 16: mod_base = OTHER; note = 2'-fluorouridine-3'-phosphate
  modified_base 17: mod_base = OTHER; note = 2'-O-methyladenosine-3'-phosphate
  modified_base 18: mod_base = OTHER; note = 2'-fluoroguanosine-3'-phosphate
  modified_base 19: mod_base = OTHER; note = 2'-O-methylcytidine-3'-phosphorothioate
  modified_base 20: mod_base = OTHER; note = 2'-O-methylcytidine-3'-phosphorothioate
  modified_base 21: mod_base = OTHER; note = 2'-O-methyladenosine
atgtccctgtgcacgtagcca

SEQ ID NO: 899 - RNA, 21 nt, synthetic construct
  source 1..21: mol_type = other RNA
  modified_base 1: mod_base = OTHER; note = 5'-phosphate-2'-O-methyladenosine-3'-phosphorothioate
  modified_base 2: mod_base = OTHER; note = 2'-fluoroadenosine-3'-phosphorothioate
  modified_base 3: mod_base = OTHER; note = 2'-O-methyluridine-3'-phosphate
  modified_base 4: mod_base = OTHER; note = 2'-fluoroguanosine-3'-phosphate
  modified_base 5: mod_base = OTHER; note = 2'-O-methyluridine-3'-phosphate
  modified_base 6: mod_base = OTHER; note = 2'-fluorocytidine-3'-phosphate
  modified_base 7: mod_base = OTHER; note = 2'-O-methylcytidine-3'-phosphate
  modified_base 8: mod_base = OTHER; note = 2'-fluorocytidine-3'-phosphate
  modified_base 9: mod_base = OTHER; note = 2'-O-methyluridine-3'-phosphate
  modified_base 10: mod_base = OTHER; note = 2'-fluoroguanosine-3'-phosphate
  modified_base 11: mod_base = OTHER; note = 2'-O-methyluridine-3'-phosphate
  modified_base 12: mod_base = OTHER; note = 2'-fluoroguanosine-3'-phosphate
  modified_base 13: mod_base = OTHER; note = 2'-O-methylcytidine-3'-phosphate
  modified_base 14: mod_base = OTHER; note = 2'-fluoroadenosine-3'-phosphate
  modified_base 15: mod_base = OTHER; note = 2'-O-methylcytidine-3'-phosphate
  modified_base 16: mod_base = OTHER; note = 2'-fluoroguanosine-3'-phosphate
  modified_base 17: mod_base = OTHER; note = 2'-O-methyluridine-3'-phosphate
  modified_base 18: mod_base = OTHER; note = 2'-fluoroadenosine-3'-phosphate
  modified_base 19: mod_base = OTHER; note = 2'-O-methylguanosine-3'-phosphorothioate
  modified_base 20: mod_base = OTHER; note = 2'-O-methylcytidine-3'-phosphorothioate
  modified_base 21: mod_base = OTHER; note = 2'-O-methylcytidine
aatgtccctgtgcacgtagcc

SEQ ID NO: 900 - RNA, 21 nt, synthetic construct
  source 1..21: mol_type = other RNA
  modified_base 1: mod_base = OTHER; note = 5'-phosphate-2'-O-methyluridine-3'-phosphorothioate
  modified_base 2: mod_base = OTHER; note = 2'-fluoroguanosine-3'-phosphorothioate
  modified_base 3: mod_base = OTHER; note = 2'-O-methyladenosine-3'-phosphate
  modified_base 4: mod_base = OTHER; note = 2'-fluorouridine-3'-phosphate
  modified_base 5: mod_base = OTHER; note = 2'-O-methylguanosine-3'-phosphate
  modified_base 6: mod_base = OTHER; note = 2'-fluorouridine-3'-phosphate
  modified_base 7: mod_base = OTHER; note = 2'-O-methylcytidine-3'-phosphate
  modified_base 8: mod_base = OTHER; note = 2'-fluorocytidine-3'-phosphate
  modified_base 9: mod_base = OTHER; note = 2'-O-methylcytidine-3'-phosphate
  modified_base 10: mod_base = OTHER; note = 2'-fluorouridine-3'-phosphate
  modified_base 11: mod_base = OTHER; note = 2'-O-methylguanosine-3'-phosphate
  modified_base 12: mod_base = OTHER; note = 2'-fluorouridine-3'-phosphate
  modified_base 13: mod_base = OTHER; note = 2'-O-methylguanosine-3'-phosphate
  modified_base 14: mod_base = OTHER; note = 2'-fluorocytidine-3'-phosphate
  modified_base 15: mod_base = OTHER; note = 2'-O-methyladenosine-3'-phosphate
  modified_base 16: mod_base = OTHER; note = 2'-fluorocytidine-3'-phosphate
  modified_base 17: mod_base = OTHER; note = 2'-O-methylguanosine-3'-phosphate
  modified_base 18: mod_base = OTHER; note = 2'-fluorouridine-3'-phosphate
  modified_base 19: mod_base = OTHER; note = 2'-O-methyladenosine-3'-phosphorothioate
  modified_base 20: mod_base = OTHER; note = 2'-O-methylguanosine-3'-phosphorothioate
  modified_base 21: mod_base = OTHER; note = 2'-O-methylcytidine
tgatgtccctgtgcacgtagc

SEQ ID NO: 901 - RNA, 21 nt, synthetic construct
  source 1..21: mol_type = other RNA
  modified_base 1: mod_base = OTHER; note = 5'-phosphate-2'-O-methyluridine-3'-phosphorothioate
  modified_base 2: mod_base = OTHER; note = 2'-fluorouridine-3'-phosphorothioate
  modified_base 3: mod_base = OTHER; note = 2'-O-methylguanosine-3'-phosphate
  modified_base 4: mod_base = OTHER; note = 2'-fluoroadenosine-3'-phosphate
  modified_base 5: mod_base = OTHER; note = 2'-O-methyluridine-3'-phosphate
  modified_base 6: mod_base = OTHER; note = 2'-fluoroguanosine-3'-phosphate
  modified_base 7: mod_base = OTHER; note = 2'-O-methyluridine-3'-phosphate
  modified_base 8: mod_base = OTHER; note = 2'-fluorocytidine-3'-phosphate
  modified_base 9: mod_base = OTHER; note = 2'-O-methylcytidine-3'-phosphate
  modified_base 10: mod_base = OTHER; note = 2'-fluorocytidine-3'-phosphate
  modified_base 11: mod_base = OTHER; note = 2'-O-methyluridine-3'-phosphate
  modified_base 12: mod_base = OTHER; note = 2'-fluoroguanosine-3'-phosphate
  modified_base 13: mod_base = OTHER; note = 2'-O-methyluridine-3'-phosphate
  modified_base 14: mod_base = OTHER; note = 2'-fluoroguanosine-3'-phosphate
  modified_base 15: mod_base = OTHER; note = 2'-O-methylcytidine-3'-phosphate
  modified_base 16: mod_base = OTHER; note = 2'-fluoroadenosine-3'-phosphate
  modified_base 17: mod_base = OTHER; note = 2'-O-methylcytidine-3'-phosphate
  modified_base 18: mod_base = OTHER; note = 2'-fluoroguanosine-3'-phosphate
  modified_base 19: mod_base = OTHER; note = 2'-O-methyluridine-3'-phosphorothioate
  modified_base 20: mod_base = OTHER; note = 2'-O-methyladenosine-3'-phosphorothioate
  modified_base 21: mod_base = OTHER; note = 2'-O-methylguanosine
ttgatgtccctgtgcacgtag

SEQ ID NO: 902 - RNA, 21 nt, synthetic construct
  source 1..21: mol_type = other RNA
  modified_base 1: mod_base = OTHER; note = 5'-phosphate-2'-O-methyluridine-3'-phosphorothioate
  modified_base 2: mod_base = OTHER; note = 2'-fluorouridine-3'-phosphorothioate
  modified_base 3: mod_base = OTHER; note = 2'-O-methyluridine-3'-phosphate
  modified_base 4: mod_base = OTHER; note = 2'-fluoroguanosine-3'-phosphate
  modified_base 5: mod_base = OTHER; note = 2'-O-methyladenosine-3'-phosphate
  modified_base 6: mod_base = OTHER; note = 2'-fluorouridine-3'-phosphate
  modified_base 7: mod_base = OTHER; note = 2'-O-methylguanosine-3'-phosphate
  modified_base 8: mod_base = OTHER; note = 2'-fluorouridine-3'-phosphate
  modified_base 9: mod_base = OTHER; note = 2'-O-methylcytidine-3'-phosphate
  modified_base 10: mod_base = OTHER; note = 2'-fluorocytidine-3'-phosphate
  modified_base 11: mod_base = OTHER; note = 2'-O-methylcytidine-3'-phosphate
  modified_base 12: mod_base = OTHER; note = 2'-fluorouridine-3'-phosphate
  modified_base 13: mod_base = OTHER; note = 2'-O-methylguanosine-3'-phosphate
  modified_base 14: mod_base = OTHER; note = 2'-fluorouridine-3'-phosphate
  modified_base 15: mod_base = OTHER; note = 2'-O-methylguanosine-3'-phosphate
  modified_base 16: mod_base = OTHER; note = 2'-fluorocytidine-3'-phosphate
  modified_base 17: mod_base = OTHER; note = 2'-O-methyladenosine-3'-phosphate
  modified_base 18: mod_base = OTHER; note = 2'-fluorocytidine-3'-phosphate
  modified_base 19: mod_base = OTHER; note = 2'-O-methylguanosine-3'-phosphorothioate
  modified_base 20: mod_base = OTHER; note = 2'-O-methyluridine-3'-phosphorothioate
  modified_base 21: mod_base = OTHER; note = 2'-O-methyladenosine
tttgatgtccctgtgcacgta

SEQ ID NO: 903 - RNA, 21 nt, synthetic construct
  source 1..21: mol_type = other RNA
  modified_base 1: mod_base = OTHER; note = 5'-phosphate-2'-O-methyladenosine-3'-phosphorothioate
  modified_base 2: mod_base = OTHER; note = 2'-fluorouridine-3'-phosphorothioate
  modified_base 3: mod_base = OTHER; note = 2'-O-methyluridine-3'-phosphate
  modified_base 4: mod_base = OTHER; note = 2'-fluorouridine-3'-phosphate
  modified_base 5: mod_base = OTHER; note = 2'-O-methylguanosine-3'-phosphate
  modified_base 6: mod_base = OTHER; note = 2'-fluoroadenosine-3'-phosphate
  modified_base 7: mod_base = OTHER; note = 2'-O-methyluridine-3'-phosphate
  modified_base 8: mod_base = OTHER; note = 2'-fluoroguanosine-3'-phosphate
  modified_base 9: mod_base = OTHER; note = 2'-O-methyluridine-3'-phosphate
  modified_base 10: mod_base = OTHER; note = 2'-fluorocytidine-3'-phosphate
  modified_base 11: mod_base = OTHER; note = 2'-O-methylcytidine-3'-phosphate
  modified_base 12: mod_base = OTHER; note = 2'-fluorocytidine-3'-phosphate
  modified_base 13: mod_base = OTHER; note = 2'-O-methyluridine-3'-phosphate
  modified_base 14: mod_base = OTHER; note = 2'-fluoroguanosine-3'-phosphate
  modified_base 15: mod_base = OTHER; note = 2'-O-methyluridine-3'-phosphate
  modified_base 16: mod_base = OTHER; note = 2'-fluoroguanosine-3'-phosphate
  modified_base 17: mod_base = OTHER; note = 2'-O-methylcytidine-3'-phosphate
  modified_base 18: mod_base = OTHER; note = 2'-fluoroadenosine-3'-phosphate
  modified_base 19: mod_base = OTHER; note = 2'-O-methylcytidine-3'-phosphorothioate
  modified_base 20: mod_base = OTHER; note = 2'-O-methylguanosine-3'-phosphorothioate
  modified_base 21: mod_base = OTHER; note = 2'-O-methyluridine
atttgatgtccctgtgcacgt

SEQ ID NO: 904 - RNA, 21 nt, synthetic construct
  source 1..21: mol_type = other RNA
  modified_base 1: mod_base = OTHER; note = 5'-phosphate-2'-O-methyladenosine-3'-phosphorothioate
  modified_base 2: mod_base = OTHER; note = 2'-fluoroguanosine-3'-phosphorothioate
  modified_base 3: mod_base = OTHER; note = 2'-O-methyluridine-3'-phosphate
  modified_base 4: mod_base = OTHER; note = 2'-fluorouridine-3'-phosphate
  modified_base 5: mod_base = OTHER; note = 2'-O-methyluridine-3'-phosphate
  modified_base 6: mod_base = OTHER; note = 2'-fluoroguanosine-3'-phosphate
  modified_base 7: mod_base = OTHER; note = 2'-O-methyladenosine-3'-phosphate
  modified_base 8: mod_base = OTHER; note = 2'-fluorouridine-3'-phosphate
  modified_base 9: mod_base = OTHER; note = 2'-O-methylguanosine-3'-phosphate
  modified_base 10: mod_base = OTHER; note = 2'-fluorouridine-3'-phosphate
  modified_base 11: mod_base = OTHER; note = 2'-O-methylcytidine-3'-phosphate
  modified_base 12: mod_base = OTHER; note = 2'-fluorocytidine-3'-phosphate
  modified_base 13: mod_base = OTHER; note = 2'-O-methylcytidine-3'-phosphate
  modified_base 14: mod_base = OTHER; note = 2'-fluorouridine-3'-phosphate
  modified_base 15: mod_base = OTHER; note = 2'-O-methylguanosine-3'-phosphate
  modified_base 16: mod_base = OTHER; note = 2'-fluorouridine-3'-phosphate
  modified_base 17: mod_base = OTHER; note = 2'-O-methylguanosine-3'-phosphate
  modified_base 18: mod_base = OTHER; note = 2'-fluorocytidine-3'-phosphate
  modified_base 19: mod_base = OTHER; note = 2'-O-methyladenosine-3'-phosphorothioate
  modified_base 20: mod_base = OTHER; note = 2'-O-methylcytidine-3'-phosphorothioate
  modified_base 21: mod_base = OTHER; note = 2'-O-methylguanosine
agtttgatgtccctgtgcacg

SEQ ID NO: 905 - RNA, 21 nt, synthetic construct
  source 1..21: mol_type = other RNA
  modified_base 1: mod_base = OTHER; note = 5'-phosphate-2'-O-methyladenosine-3'-phosphorothioate
  modified_base 2: mod_base = OTHER; note = 2'-fluorouridine-3'-phosphorothioate
  modified_base 3: mod_base = OTHER; note = 2'-O-methylcytidine-3'-phosphate
  modified_base 4: mod_base = OTHER; note = 2'-fluoroadenosine-3'-phosphate
  modified_base 5: mod_base = OTHER; note = 2'-O-methylcytidine-3'-phosphate
  modified_base 6: mod_base = OTHER; note = 2'-fluorocytidine-3'-phosphate
  modified_base 7: mod_base = OTHER; note = 2'-O-methyladenosine-3'-phosphate
  modified_base 8: mod_base = OTHER; note = 2'-fluorouridine-3'-phosphate
  modified_base 9: mod_base = OTHER; note = 2'-O-methylguanosine-3'-phosphate
  modified_base 10: mod_base = OTHER; note = 2'-fluoroguanosine-3'-phosphate
  modified_base 11: mod_base = OTHER; note = 2'-O-methylcytidine-3'-phosphate
  modified_base 12: mod_base = OTHER; note = 2'-fluoroadenosine-3'-phosphate
  modified_base 13: mod_base = OTHER; note = 2'-O-methylguanosine-3'-phosphate
  modified_base 14: mod_base = OTHER; note = 2'-fluorouridine-3'-phosphate
  modified_base 15: mod_base = OTHER; note = 2'-O-methylguanosine-3'-phosphate
  modified_base 16: mod_base = OTHER; note = 2'-fluoroadenosine-3'-phosphate
  modified_base 17: mod_base = OTHER; note = 2'-O-methylguanosine-3'-phosphate
  modified_base 18: mod_base = OTHER; note = 2'-fluorocytidine-3'-phosphate
  modified_base 19: mod_base = OTHER; note = 2'-O-methylcytidine-3'-phosphorothioate
  modified_base 20: mod_base = OTHER; note = 2'-O-methylcytidine-3'-phosphorothioate
  modified_base 21: mod_base = OTHER; note = 2'-O-methylguanosine
atcaccatggcagtgagcccg

SEQ ID NO: 906 - RNA, 21 nt, synthetic construct
  source 1..21: mol_type = other RNA
  modified_base 1: mod_base = OTHER; note = 5'-phosphate-2'-O-methyladenosine-3'-phosphorothioate
  modified_base 2: mod_base = OTHER; note = 2'-fluorocytidine-3'-phosphorothioate
  modified_base 3: mod_base = OTHER; note = 2'-O-methyluridine-3'-phosphate
  modified_base 4: mod_base = OTHER; note = 2'-fluorocytidine-3'-phosphate
  modified_base 5: mod_base = OTHER; note = 2'-O-methyladenosine-3'-phosphate
  modified_base 6: mod_base = OTHER; note = 2'-fluorocytidine-3'-phosphate
  modified_base 7: mod_base = OTHER; note = 2'-O-methylcytidine-3'-phosphate
  modified_base 8: mod_base = OTHER; note = 2'-fluoroadenosine-3'-phosphate
  modified_base 9: mod_base = OTHER; note = 2'-O-methyluridine-3'-phosphate
  modified_base 10: mod_base = OTHER; note = 2'-fluoroguanosine-3'-phosphate
  modified_base 11: mod_base = OTHER; note = 2'-O-methylguanosine-3'-phosphate
  modified_base 12: mod_base = OTHER; note = 2'-fluorocytidine-3'-phosphate
  modified_base 13: mod_base = OTHER; note = 2'-O-methyladenosine-3'-phosphate
  modified_base 14: mod_base = OTHER; note = 2'-fluoroguanosine-3'-phosphate
  modified_base 15: mod_base = OTHER; note = 2'-O-methyluridine-3'-phosphate
  modified_base 16: mod_base = OTHER; note = 2'-fluoroguanosine-3'-phosphate
  modified_base 17: mod_base = OTHER; note = 2'-O-methyladenosine-3'-phosphate
  modified_base 18: mod_base = OTHER; note = 2'-fluoroguanosine-3'-phosphate
  modified_base 19: mod_base = OTHER; note = 2'-O-methylcytidine-3'-phosphorothioate
  modified_base 20: mod_base = OTHER; note = 2'-O-methylcytidine-3'-phosphorothioate
  modified_base 21: mod_base = OTHER; note = 2'-O-methylcytidine
actcaccatggcagtgagccc

SEQ ID NO: 907 - RNA, 21 nt, synthetic construct
  source 1..21: mol_type = other RNA
  modified_base 1: mod_base = OTHER; note = 5'-phosphate-2'-O-methyladenosine-3'-phosphorothioate
  modified_base 2: mod_base = OTHER; note = 2'-fluoroguanosine-3'-phosphorothioate
  modified_base 3: mod_base = OTHER; note = 2'-O-methylcytidine-3'-phosphate
  modified_base 4: mod_base = OTHER; note = 2'-fluorouridine-3'-phosphate
  modified_base 5: mod_base = OTHER; note = 2'-O-methylcytidine-3'-phosphate
  modified_base 6: mod_base = OTHER; note = 2'-fluoroadenosine-3'-phosphate
  modified_base 7: mod_base = OTHER; note = 2'-O-methylcytidine-3'-phosphate
  modified_base 8: mod_base = OTHER; note = 2'-fluorocytidine-3'-phosphate
  modified_base 9: mod_base = OTHER; note = 2'-O-methyladenosine-3'-phosphate
  modified_base 10: mod_base = OTHER; note = 2'-fluorouridine-3'-phosphate
  modified_base 11: mod_base = OTHER; note = 2'-O-methylguanosine-3'-phosphate
  modified_base 12: mod_base = OTHER; note = 2'-fluoroguanosine-3'-phosphate
  modified_base 13: mod_base = OTHER; note = 2'-O-methylcytidine-3'-phosphate
  modified_base 14: mod_base = OTHER; note = 2'-fluoroadenosine-3'-phosphate
  modified_base 15: mod_base = OTHER; note = 2'-O-methylguanosine-3'-phosphate
  modified_base 16: mod_base = OTHER; note = 2'-fluorouridine-3'-phosphate
  modified_base 17: mod_base = OTHER; note = 2'-O-methylguanosine-3'-phosphate
  modified_base 18: mod_base = OTHER; note = 2'-fluoroadenosine-3'-phosphate
  modified_base 19: mod_base = OTHER; note = 2'-O-methylguanosine-3'-phosphorothioate
  modified_base 20: mod_base = OTHER; note = 2'-O-methylcytidine-3'-phosphorothioate
  modified_base 21: mod_base = OTHER; note = 2'-O-methylcytidine
agctcaccatggcagtgagcc

SEQ ID NO: 908 - RNA, 21 nt, synthetic construct
  source 1..21: mol_type = other RNA
  modified_base 1: mod_base = OTHER; note = 5'-phosphate-2'-O-methyladenosine-3'-phosphorothioate
  modified_base 2: mod_base = OTHER; note = 2'-fluorocytidine-3'-phosphorothioate
  modified_base 3: mod_base = OTHER; note = 2'-O-methylguanosine-3'-phosphate
  modified_base 4: mod_base = OTHER; note = 2'-fluorocytidine-3'-phosphate
  modified_base 5: mod_base = OTHER; note = 2'-O-methyluridine-3'-phosphate
  modified_base 6: mod_base = OTHER; note = 2'-fluorocytidine-3'-phosphate
  modified_base 7: mod_base = OTHER; note = 2'-O-methyladenosine-3'-phosphate
  modified_base 8: mod_base = OTHER; note = 2'-fluorocytidine-3'-phosphate
  modified_base 9: mod_base = OTHER; note = 2'-O-methylcytidine-3'-phosphate
  modified_base 10: mod_base = OTHER; note = 2'-fluoroadenosine-3'-phosphate
  modified_base 11: mod_base = OTHER; note = 2'-O-methyluridine-3'-phosphate
  modified_base 12: mod_base = OTHER; note = 2'-fluoroguanosine-3'-phosphate
  modified_base 13: mod_base = OTHER; note = 2'-O-methylguanosine-3'-phosphate
  modified_base 14: mod_base = OTHER; note = 2'-fluorocytidine-3'-phosphate
  modified_base 15: mod_base = OTHER; note = 2'-O-methyladenosine-3'-phosphate
  modified_base 16: mod_base = OTHER; note = 2'-fluoroguanosine-3'-phosphate
  modified_base 17: mod_base = OTHER; note = 2'-O-methyluridine-3'-phosphate
  modified_base 18: mod_base = OTHER; note = 2'-fluoroguanosine-3'-phosphate
  modified_base 19: mod_base = OTHER; note = 2'-O-methyladenosine-3'-phosphorothioate
  modified_base 20: mod_base = OTHER; note = 2'-O-methylguanosine-3'-phosphorothioate
  modified_base 21: mod_base = OTHER; note = 2'-O-methylcytidine
acgctcaccatggcagtgagc

SEQ ID NO: 909 - RNA, 21 nt, synthetic construct
  source 1..21: mol_type = other RNA
  modified_base 1: mod_base = OTHER; note = 5'-phosphate-2'-O-methyluridine-3'-phosphorothioate
  modified_base 2: mod_base = OTHER; note = 2'-fluorocytidine-3'-phosphorothioate
  modified_base 3: mod_base = OTHER; note = 2'-O-methyladenosine-3'-phosphate
  modified_base 4: mod_base = OTHER; note = 2'-fluoroguanosine-3'-phosphate
  modified_base 5: mod_base = OTHER; note = 2'-O-methylguanosine-3'-phosphate
  modified_base 6: mod_base = OTHER; note = 2'-fluorocytidine-3'-phosphate
  modified_base 7: mod_base = OTHER; note = 2'-O-methyluridine-3'-phosphate
  modified_base 8: mod_base = OTHER; note = 2'-fluorocytidine-3'-phosphate
  modified_base 9: mod_base = OTHER; note = 2'-O-methyluridine-3'-phosphate
  modified_base 10: mod_base = OTHER; note = 2'-fluoroguanosine-3'-phosphate
  modified_base 11: mod_base = OTHER; note = 2'-O-methylcytidine-3'-phosphate
  modified_base 12: mod_base = OTHER; note = 2'-fluorocytidine-3'-phosphate
  modified_base 13: mod_base = OTHER; note = 2'-O-methylguanosine-3'-phosphate
  modified_base 14: mod_base = OTHER; note = 2'-fluoroguanosine-3'-phosphate
  modified_base 15: mod_base = OTHER; note = 2'-O-methylguanosine-3'-phosphate
  modified_base 16: mod_base = OTHER; note = 2'-fluorouridine-3'-phosphate
  modified_base 17: mod_base = OTHER; note = 2'-O-methylguanosine-3'-phosphate
  modified_base 18: mod_base = OTHER; note = 2'-fluoroadenosine-3'-phosphate
  modified_base 19: mod_base = OTHER; note = 2'-O-methylguanosine-3'-phosphorothioate
  modified_base 20: mod_base = OTHER; note = 2'-O-methylcytidine-3'-phosphorothioate
  modified_base 21: mod_base = OTHER; note = 2'-O-methyladenosine
tcaggctctgccgggtgagca

SEQ ID NO: 910 - RNA, 21 nt, synthetic construct
  source 1..21: mol_type = other RNA
  modified_base 1: mod_base = OTHER; note = 5'-phosphate-2'-O-methyladenosine-3'-phosphorothioate
  modified_base 2: mod_base = OTHER; note = 2'-fluorouridine-3'-phosphorothioate
  modified_base 3: mod_base = OTHER; note = 2'-O-methylcytidine-3'-phosphate
  modified_base 4: mod_base = OTHER; note = 2'-fluoroadenosine-3'-phosphate
  modified_base 5: mod_base = OTHER; note = 2'-O-methylguanosine-3'-phosphate
  modified_base 6: mod_base = OTHER; note = 2'-fluoroguanosine-3'-phosphate
  modified_base 7: mod_base = OTHER; note = 2'-O-methylcytidine-3'-phosphate
  modified_base 8: mod_base = OTHER; note = 2'-fluorouridine-3'-phosphate
  modified_base 9: mod_base = OTHER; note = 2'-O-methylcytidine-3'-phosphate
  modified_base 10: mod_base = OTHER; note = 2'-fluorouridine-3'-phosphate
  modified_base 11: mod_base = OTHER; note = 2'-O-methylguanosine-3'-phosphate
  modified_base 12: mod_base = OTHER; note = 2'-fluorocytidine-3'-phosphate
  modified_base 13: mod_base = OTHER; note = 2'-O-methylcytidine-3'-phosphate
  modified_base 14: mod_base = OTHER; note = 2'-fluoroguanosine-3'-phosphate
  modified_base 15: mod_base = OTHER; note = 2'-O-methylguanosine-3'-phosphate
  modified_base 16: mod_base = OTHER; note = 2'-fluoroguanosine-3'-phosphate
  modified_base 17: mod_base = OTHER; note = 2'-O-methyluridine-3'-phosphate
  modified_base 18: mod_base = OTHER; note = 2'-fluoroguanosine-3'-phosphate
  modified_base 19: mod_base = OTHER; note = 2'-O-methyladenosine-3'-phosphorothioate
  modified_base 20: mod_base = OTHER; note = 2'-O-methylguanosine-3'-phosphorothioate
  modified_base 21: mod_base = OTHER; note = 2'-O-methylcytidine
atcaggctctgccgggtgagc

SEQ ID NO: 911 - RNA, 21 nt, synthetic construct
  source 1..21: mol_type = other RNA
  modified_base 1: mod_base = OTHER; note = 5'-phosphate-2'-O-methyladenosine-3'-phosphorothioate
  modified_base 2: mod_base = OTHER; note = 2'-fluorouridine-3'-phosphorothioate
  modified_base 3: mod_base = OTHER; note = 2'-O-methylguanosine-3'-phosphate
  modified_base 4: mod_base = OTHER; note = 2'-fluoroguanosine-3'-phosphate
  modified_base 5: mod_base = OTHER; note = 2'-O-methylguanosine-3'-phosphate
  modified_base 6: mod_base = OTHER; note = 2'-fluoroadenosine-3'-phosphate
  modified_base 7: mod_base = OTHER; note = 2'-O-methyladenosine-3'-phosphate
  modified_base 8: mod_base = OTHER; note = 2'-fluoroguanosine-3'-phosphate
  modified_base 9: mod_base = OTHER; note = 2'-O-methylguanosine-3'-phosphate
  modified_base 10: mod_base = OTHER; note = 2'-fluorouridine-3'-phosphate
  modified_base 11: mod_base = OTHER; note = 2'-O-methylguanosine-3'-phosphate
  modified_base 12: mod_base = OTHER; note = 2'-fluoroguanosine-3'-phosphate
  modified_base 13: mod_base = OTHER; note = 2'-O-methyladenosine-3'-phosphate
  modified_base 14: mod_base = OTHER; note = 2'-fluorouridine-3'-phosphate
  modified_base 15: mod_base = OTHER; note = 2'-O-methylcytidine-3'-phosphate
  modified_base 16: mod_base = OTHER; note = 2'-fluorocytidine-3'-phosphate
  modified_base 17: mod_base = OTHER; note = 2'-O-methylguanosine-3'-phosphate
  modified_base 18: mod_base = OTHER; note = 2'-fluorouridine-3'-phosphate
  modified_base 19: mod_base = OTHER; note = 2'-O-methylguanosine-3'-phosphorothioate
  modified_base 20: mod_base = OTHER; note = 2'-O-methylguanosine-3'-phosphorothioate
  modified_base 21: mod_base = OTHER; note = 2'-O-methylcytidine
atgggaaggtggatccgtggc

SEQ ID NO: 912 - RNA, 21 nt, synthetic construct
  source 1..21: mol_type = other RNA
  modified_base 1: mod_base = OTHER; note = 5'-phosphate-2'-O-methylguanosine-3'-phosphorothioate
  modified_base 2: mod_base = OTHER; note = 2'-fluoroadenosine-3'-phosphorothioate
  modified_base 3: mod_base = OTHER; note = 2'-O-methyluridine-3'-phosphate
  modified_base 4: mod_base = OTHER; note = 2'-fluoroguanosine-3'-phosphate
  modified_base 5: mod_base = OTHER; note = 2'-O-methylguanosine-3'-phosphate
  modified_base 6: mod_base = OTHER; note = 2'-fluoroguanosine-3'-phosphate
  modified_base 7: mod_base = OTHER; note = 2'-O-methyladenosine-3'-phosphate
  modified_base 8: mod_base = OTHER; note = 2'-fluoroadenosine-3'-phosphate
  modified_base 9: mod_base = OTHER; note = 2'-O-methylguanosine-3'-phosphate
  modified_base 10: mod_base = OTHER; note = 2'-fluoroguanosine-3'-phosphate
  modified_base 11: mod_base = OTHER; note = 2'-O-methyluridine-3'-phosphate
  modified_base 12: mod_base = OTHER; note = 2'-fluoroguanosine-3'-phosphate
  modified_base 13: mod_base = OTHER; note = 2'-O-methylguanosine-3'-phosphate
  modified_base 14: mod_base = OTHER; note = 2'-fluoroadenosine-3'-phosphate
  modified_base 15: mod_base = OTHER; note = 2'-O-methyluridine-3'-phosphate
  modified_base 16: mod_base = OTHER; note = 2'-fluorocytidine-3'-phosphate
  modified_base 17: mod_base = OTHER; note = 2'-O-methylcytidine-3'-phosphate
  modified_base 18: mod_base = OTHER; note = 2'-fluoroguanosine-3'-phosphate
  modified_base 19: mod_base = OTHER; note = 2'-O-methyluridine-3'-phosphorothioate
  modified_base 20: mod_base = OTHER; note = 2'-O-methylguanosine-3'-phosphorothioate
  modified_base 21: mod_base = OTHER; note = 2'-O-methylguanosine
gatgggaaggtggatccgtgg

SEQ ID NO: 913 - RNA, 21 nt, synthetic construct
  source 1..21: mol_type = other RNA
  modified_base 1: mod_base = OTHER; note = 5'-phosphate-2'-O-methyladenosine-3'-phosphorothioate
  modified_base 2: mod_base = OTHER; note = 2'-fluoroguanosine-3'-phosphorothioate
  modified_base 3: mod_base = OTHER; note = 2'-O-methyladenosine-3'-phosphate
  modified_base 4: mod_base = OTHER; note = 2'-fluorouridine-3'-phosphate
  modified_base 5: mod_base = OTHER; note = 2'-O-methylguanosine-3'-phosphate
  modified_base 6: mod_base = OTHER; note = 2'-fluoroguanosine-3'-phosphate
  modified_base 7: mod_base = OTHER; note = 2'-O-methylguanosine-3'-phosphate
  modified_base 8: mod_base = OTHER; note = 2'-fluoroadenosine-3'-phosphate
  modified_base 9: mod_base = OTHER; note = 2'-O-methyladenosine-3'-phosphate
  modified_base 10: mod_base = OTHER; note = 2'-fluoroguanosine-3'-phosphate
  modified_base 11: mod_base = OTHER; note = 2'-O-methylguanosine-3'-phosphate
  modified_base 12: mod_base = OTHER; note = 2'-fluorouridine-3'-phosphate
  modified_base 13: mod_base = OTHER; note = 2'-O-methylguanosine-3'-phosphate
  modified_base 14: mod_base = OTHER; note = 2'-fluoroguanosine-3'-phosphate
  modified_base 15: mod_base = OTHER; note = 2'-O-methyladenosine-3'-phosphate
  modified_base 16: mod_base = OTHER; note = 2'-fluorouridine-3'-phosphate
  modified_base 17: mod_base = OTHER; note = 2'-O-methylcytidine-3'-phosphate
  modified_base 18: mod_base = OTHER; note = 2'-fluorocytidine-3'-phosphate
  modified_base 19: mod_base = OTHER; note = 2'-O-methylguanosine-3'-phosphorothioate
  modified_base 20: mod_base = OTHER; note = 2'-O-methyluridine-3'-phosphorothioate
  modified_base 21: mod_base = OTHER; note = 2'-O-methylguanosine
agatgggaaggtggatccgtg

SEQ ID NO: 914 - RNA, 21 nt, synthetic construct
  source 1..21: mol_type = other RNA
  modified_base 1: mod_base = OTHER; note = 5'-phosphate-2'-O-methyluridine-3'-phosphorothioate
  modified_base 2: mod_base = OTHER; note = 2'-fluoroadenosine-3'-phosphorothioate
  modified_base 3: mod_base = OTHER; note = 2'-O-methylguanosine-3'-phosphate
  modified_base 4: mod_base = OTHER; note = 2'-fluoroadenosine-3'-phosphate
  modified_base 5: mod_base = OTHER; note = 2'-O-methyluridine-3'-phosphate
  modified_base 6: mod_base = OTHER; note = 2'-fluoroguanosine-3'-phosphate
  modified_base 7: mod_base = OTHER; note = 2'-O-methylguanosine-3'-phosphate
  modified_base 8: mod_base = OTHER; note = 2'-fluoroguanosine-3'-phosphate
  modified_base 9: mod_base = OTHER; note = 2'-O-methyladenosine-3'-phosphate
  modified_base 10: mod_base = OTHER; note = 2'-fluoroadenosine-3'-phosphate
  modified_base 11: mod_base = OTHER; note = 2'-O-methylguanosine-3'-phosphate
  modified_base 12: mod_base = OTHER; note = 2'-fluoroguanosine-3'-phosphate
  modified_base 13: mod_base = OTHER; note = 2'-O-methyluridine-3'-phosphate
  modified_base 14: mod_base = OTHER; note = 2'-fluoroguanosine-3'-phosphate
  modified_base 15: mod_base = OTHER; note = 2'-O-methylguanosine-3'-phosphate
  modified_base 16: mod_base = OTHER; note = 2'-fluoroadenosine-3'-phosphate
  modified_base 17: mod_base = OTHER; note = 2'-O-methyluridine-3'-phosphate
  modified_base 18: mod_base = OTHER; note = 2'-fluorocytidine-3'-phosphate
  modified_base 19: mod_base = OTHER; note = 2'-O-methylcytidine-3'-phosphorothioate
  modified_base 20: mod_base = OTHER; note = 2'-O-methylguanosine-3'-phosphorothioate
  modified_base 21: mod_base = OTHER; note = 2'-O-methyluridine
tagatgggaaggtggatccgt

SEQ ID NO: 915 - RNA, 21 nt, synthetic construct
  source 1..21: mol_type = other RNA
  modified_base 1: mod_base = OTHER; note = 5'-phosphate-2'-O-methyladenosine-3'-phosphorothioate
  modified_base 2: mod_base = OTHER; note = 2'-fluorouridine-3'-phosphorothioate
  modified_base 3: mod_base = OTHER; note = 2'-O-methyladenosine-3'-phosphate
  modified_base 4: mod_base = OTHER; note = 2'-fluoroguanosine-3'-phosphate
  modified_base 5: mod_base = OTHER; note = 2'-O-methyladenosine-3'-phosphate
  modified_base 6: mod_base = OTHER; note = 2'-fluorouridine-3'-phosphate
  modified_base 7: mod_base = OTHER; note = 2'-O-methylguanosine-3'-phosphate
  modified_base 8: mod_base = OTHER; note = 2'-fluoroguanosine-3'-phosphate
  modified_base 9: mod_base = OTHER; note = 2'-O-methylguanosine-3'-phosphate
  modified_base 10: mod_base = OTHER; note = 2'-fluoroadenosine-3'-phosphate
  modified_base 11: mod_base = OTHER; note = 2'-O-methyladenosine-3'-phosphate
  modified_base 12: mod_base = OTHER; note = 2'-fluoroguanosine-3'-phosphate
  modified_base 13: mod_base = OTHER; note = 2'-O-methylguanosine-3'-phosphate
  modified_base 14: mod_base = OTHER; note = 2'-fluorouridine-3'-phosphate
  modified_base 15: mod_base = OTHER; note = 2'-O-methylguanosine-3'-phosphate
  modified_base 16: mod_base = OTHER; note = 2'-fluoroguanosine-3'-phosphate
  modified_base 17: mod_base = OTHER; note = 2'-O-methyladenosine-3'-phosphate
  modified_base 18: mod_base = OTHER; note = 2'-fluorouridine-3'-phosphate
  modified_base 19: mod_base = OTHER; note = 2'-O-methylcytidine-3'-phosphorothioate
  modified_base 20: mod_base = OTHER; note = 2'-O-methylcytidine-3'-phosphorothioate
  modified_base 21: mod_base = OTHER; note = 2'-O-methylguanosine
atagatgggaaggtggatccg

SEQ ID NO: 916 - RNA, 21 nt, synthetic construct
  source 1..21: mol_type = other RNA
  modified_base 1: mod_base = OTHER; note = 5'-phosphate-2'-O-methyluridine-3'-phosphorothioate
  modified_base 2: mod_base = OTHER; note = 2'-fluorocytidine-3'-phosphorothioate
  modified_base 3: mod_base = OTHER; note = 2'-O-methyluridine-3'-phosphate
  modified_base 4: mod_base = OTHER; note = 2'-fluoroadenosine-3'-phosphate
  modified_base 5: mod_base = OTHER; note = 2'-O-methylguanosine-3'-phosphate
  modified_base 6: mod_base = OTHER; note = 2'-fluoroadenosine-3'-phosphate
  modified_base 7: mod_base = OTHER; note = 2'-O-methyluridine-3'-phosphate
  modified_base 8: mod_base = OTHER; note = 2'-fluoroguanosine-3'-phosphate
  modified_base 9: mod_base = OTHER; note = 2'-O-methylguanosine-3'-phosphate
  modified_base 10: mod_base = OTHER; note = 2'-fluoroguanosine-3'-phosphate
  modified_base 11: mod_base = OTHER; note = 2'-O-methyladenosine-3'-phosphate
  modified_base 12: mod_base = OTHER; note = 2'-fluoroadenosine-3'-phosphate
  modified_base 13: mod_base = OTHER; note = 2'-O-methylguanosine-3'-phosphate
  modified_base 14: mod_base = OTHER; note = 2'-fluoroguanosine-3'-phosphate
  modified_base 15: mod_base = OTHER; note = 2'-O-methyluridine-3'-phosphate
  modified_base 16: mod_base = OTHER; note = 2'-fluoroguanosine-3'-phosphate
  modified_base 17: mod_base = OTHER; note = 2'-O-methylguanosine-3'-phosphate
  modified_base 18: mod_base = OTHER; note = 2'-fluoroadenosine-3'-phosphate
  modified_base 19: mod_base = OTHER; note = 2'-O-methyluridine-3'-phosphorothioate
  modified_base 20: mod_base = OTHER; note = 2'-O-methylcytidine-3'-phosphorothioate
  modified_base 21: mod_base = OTHER; note = 2'-O-methylcytidine
tctagatgggaaggtggatcc

SEQ ID NO: 917 - RNA, 21 nt, synthetic construct
  source 1..21: mol_type = other RNA
  modified_base 1: mod_base = OTHER; note = 5'-phosphate-2'-O-methyladenosine-3'-phosphorothioate
  modified_base 2: mod_base = OTHER; note = 2'-fluorouridine-3'-phosphorothioate
  modified_base 3: mod_base = OTHER; note = 2'-O-methylcytidine-3'-phosphate
  modified_base 4: mod_base = OTHER; note = 2'-fluorouridine-3'-phosphate
  modified_base 5: mod_base = OTHER; note = 2'-O-methyladenosine-3'-phosphate
  modified_base 6: mod_base = OTHER; note = 2'-fluoroguanosine-3'-phosphate
  modified_base 7: mod_base = OTHER; note = 2'-O-methyladenosine-3'-phosphate
  modified_base 8: mod_base = OTHER; note = 2'-fluorouridine-3'-phosphate
  modified_base 9: mod_base = OTHER; note = 2'-O-methylguanosine-3'-phosphate
  modified_base 10: mod_base = OTHER; note = 2'-fluoroguanosine-3'-phosphate
  modified_base 11: mod_base = OTHER; note = 2'-O-methylguanosine-3'-phosphate
  modified_base 12: mod_base = OTHER; note = 2'-fluoroadenosine-3'-phosphate
  modified_base 13: mod_base = OTHER; note = 2'-O-methyladenosine-3'-phosphate
  modified_base 14: mod_base = OTHER; note = 2'-fluoroguanosine-3'-phosphate
  modified_base 15: mod_base = OTHER; note = 2'-O-methylguanosine-3'-phosphate
  modified_base 16: mod_base = OTHER; note = 2'-fluorouridine-3'-phosphate
  modified_base 17: mod_base = OTHER; note = 2'-O-methylguanosine-3'-phosphate
  modified_base 18: mod_base = OTHER; note = 2'-fluoroguanosine-3'-phosphate
  modified_base 19: mod_base = OTHER; note = 2'-O-methyladenosine-3'-phosphorothioate
  modified_base 20: mod_base = OTHER; note = 2'-O-methyluridine-3'-phosphorothioate
  modified_base 21: mod_base = OTHER; note = 2'-O-methylcytidine
atctagatgggaaggtggatc

SEQ ID NO: 918 - RNA, 21 nt, synthetic construct
  source 1..21: mol_type = other RNA
  modified_base 1: mod_base = OTHER; note = 5'-phosphate-2'-O-methyladenosine-3'-phosphorothioate
  modified_base 2: mod_base = OTHER; note = 2'-fluoroadenosine-3'-phosphorothioate
  modified_base 3: mod_base = OTHER; note = 2'-O-methyluridine-3'-phosphate
  modified_base 4: mod_base = OTHER; note = 2'-fluorocytidine-3'-phosphate
  modified_base 5: mod_base = OTHER; note = 2'-O-methyluridine-3'-phosphate
  modified_base 6: mod_base = OTHER; note = 2'-fluoroadenosine-3'-phosphate
  modified_base 7: mod_base = OTHER; note = 2'-O-methylguanosine-3'-phosphate
  modified_base 8: mod_base = OTHER; note = 2'-fluoroadenosine-3'-phosphate
  modified_base 9: mod_base = OTHER; note = 2'-O-methyluridine-3'-phosphate
  modified_base 10: mod_base = OTHER; note = 2'-fluoroguanosine-3'-phosphate
  modified_base 11: mod_base = OTHER; note = 2'-O-methylguanosine-3'-phosphate
  modified_base 12: mod_base = OTHER; note = 2'-fluoroguanosine-3'-phosphate
  modified_base 13: mod_base = OTHER; note = 2'-O-methyladenosine-3'-phosphate
  modified_base 14: mod_base = OTHER; note = 2'-fluoroadenosine-3'-phosphate
  modified_base 15: mod_base = OTHER; note = 2'-O-methylguanosine-3'-phosphate
  modified_base 16: mod_base = OTHER; note = 2'-fluoroguanosine-3'-phosphate
  modified_base 17: mod_base = OTHER; note = 2'-O-methyluridine-3'-phosphate
  modified_base 18: mod_base = OTHER; note = 2'-fluoroguanosine-3'-phosphate
  modified_base 19: mod_base = OTHER; note = 2'-O-methylguanosine-3'-phosphorothioate
  modified_base 20: mod_base = OTHER; note = 2'-O-methyladenosine-3'-phosphorothioate
  modified_base 21: mod_base = OTHER; note = 2'-O-methyluridine
aatctagatgggaaggtggat

SEQ ID NO: 919 - RNA, 21 nt, synthetic construct
  source 1..21: mol_type = other RNA
  modified_base 1: mod_base = OTHER; note = 5'-phosphate-2'-O-methyladenosine-3'-phosphorothioate
  modified_base 2: mod_base = OTHER; note = 2'-fluorouridine-3'-phosphorothioate
  modified_base 3: mod_base = OTHER; note = 2'-O-methylguanosine-3'-phosphate
  modified_base 4: mod_base = OTHER; note = 2'-fluoroguanosine-3'-phosphate
  modified_base 5: mod_base = OTHER; note = 2'-O-methylcytidine-3'-phosphate
  modified_base 6: mod_base = OTHER; note = 2'-fluoroadenosine-3'-phosphate
  modified_base 7: mod_base = OTHER; note = 2'-O-methylguanosine-3'-phosphate
  modified_base 8: mod_base = OTHER; note = 2'-fluoroguanosine-3'-phosphate
  modified_base 9: mod_base = OTHER; note = 2'-O-methylguanosine-3'-phosphate
  modified_base 10: mod_base = OTHER; note = 2'-fluoroadenosine-3'-phosphate
  modified_base 11: mod_base = OTHER; note = 2'-O-methylguanosine-3'-phosphate
  modified_base 12: mod_base = OTHER; note = 2'-fluorocytidine-3'-phosphate
  modified_base 13: mod_base = OTHER; note = 2'-O-methyladenosine-3'-phosphate
  modified_base 14: mod_base = OTHER; note = 2'-fluoroguanosine-3'-phosphate
  modified_base 15: mod_base = OTHER; note = 2'-O-methylcytidine-3'-phosphate
  modified_base 16: mod_base = OTHER; note = 2'-fluoroadenosine-3'-phosphate
  modified_base 17: mod_base = OTHER; note = 2'-O-methylguanosine-3'-phosphate
  modified_base 18: mod_base = OTHER; note = 2'-fluoroguanosine-3'-phosphate
  modified_base 19: mod_base = OTHER; note = 2'-O-methyluridine-3'-phosphorothioate
  modified_base 20: mod_base = OTHER; note = 2'-O-methylguanosine-3'-phosphorothioate
  modified_base 21: mod_base = OTHER; note = 2'-O-methylguanosine
atggcagggagcagcaggtgg

SEQ ID NO: 920 - RNA, 21 nt, synthetic construct
  source 1..21: mol_type = other RNA
  modified_base 1: mod_base = OTHER; note = 5'-phosphate-2'-O-methyladenosine-3'-phosphorothioate
  modified_base 2: mod_base = OTHER; note = 2'-fluoroadenosine-3'-phosphorothioate
  modified_base 3: mod_base = OTHER; note = 2'-O-methyluridine-3'-phosphate
  modified_base 4: mod_base = OTHER; note = 2'-fluoroadenosine-3'-phosphate
  modified_base 5: mod_base = OTHER; note = 2'-O-methylguanosine-3'-phosphate
  modified_base 6: mod_base = OTHER; note = 2'-fluoroguanosine-3'-phosphate
  modified_base 7: mod_base = OTHER; note = 2'-O-methylcytidine-3'-phosphate
  modified_base 8: mod_base = OTHER; note = 2'-fluorocytidine-3'-phosphate
  modified_base 9: mod_base = OTHER; note = 2'-O-methyladenosine-3'-phosphate
  modified_base 10: mod_base = OTHER; note = 2'-fluoroguanosine-3'-phosphate
  modified_base 11: mod_base = OTHER; note = 2'-O-methylguanosine-3'-phosphate
  modified_base 12: mod_base = OTHER; note = 2'-fluorocytidine-3'-phosphate
  modified_base 13: mod_base = OTHER; note = 2'-O-methylcytidine-3'-phosphate
  modified_base 14: mod_base = OTHER; note = 2'-fluorouridine-3'-phosphate
  modified_base 15: mod_base = OTHER; note = 2'-O-methyladenosine-3'-phosphate
  modified_base 16: mod_base = OTHER; note = 2'-fluoroguanosine-3'-phosphate
  modified_base 17: mod_base = OTHER; note = 2'-O-methylguanosine-3'-phosphate
  modified_base 18: mod_base = OTHER; note = 2'-fluoroguanosine-3'-phosphate
  modified_base 19: mod_base = OTHER; note = 2'-O-methyladenosine-3'-phosphorothioate
  modified_base 20: mod_base = OTHER; note = 2'-O-methylcytidine-3'-phosphorothioate
  modified_base 21: mod_base = OTHER; note = 2'-O-methylcytidine
aataggccaggcctagggacc

SEQ ID NO: 921 - RNA, 21 nt, synthetic construct
  source 1..21: mol_type = other RNA
  modified_base 1: mod_base = OTHER; note = 5'-phosphate-2'-O-methyladenosine-3'-phosphorothioate
  modified_base 2: mod_base = OTHER; note = 2'-fluorocytidine-3'-phosphorothioate
  modified_base 3: mod_base = OTHER; note = 2'-O-methyladenosine-3'-phosphate
  modified_base 4: mod_base = OTHER; note = 2'-fluoroadenosine-3'-phosphate
  modified_base 5: mod_base = OTHER; note = 2'-O-methyluridine-3'-phosphate
  modified_base 6: mod_base = OTHER; note = 2'-fluoroadenosine-3'-phosphate
  modified_base 7: mod_base = OTHER; note = 2'-O-methyladenosine-3'-phosphate
  modified_base 8: mod_base = OTHER; note = 2'-fluoroadenosine-3'-phosphate
  modified_base 9: mod_base = OTHER; note = 2'-O-methyluridine-3'-phosphate
  modified_base 10: mod_base = OTHER; note = 2'-fluoroadenosine-3'-phosphate
  modified_base 11: mod_base = OTHER; note = 2'-O-methylcytidine-3'-phosphate
  modified_base 12: mod_base = OTHER; note = 2'-fluorocytidine-3'-phosphate
  modified_base 13: mod_base = OTHER; note = 2'-O-methylguanosine-3'-phosphate
  modified_base 14: mod_base = OTHER; note = 2'-fluoroadenosine-3'-phosphate
  modified_base 15: mod_base = OTHER; note = 2'-O-methylguanosine-3'-phosphate
  modified_base 16: mod_base = OTHER; note = 2'-fluoroguanosine-3'-phosphate
  modified_base 17: mod_base = OTHER; note = 2'-O-methyladenosine-3'-phosphate
  modified_base 18: mod_base = OTHER; note = 2'-fluoroadenosine-3'-phosphate
  modified_base 19: mod_base = OTHER; note = 2'-O-methyluridine-3'-phosphorothioate
  modified_base 20: mod_base = OTHER; note = 2'-O-methylguanosine-3'-phosphorothioate
  modified_base 21: mod_base = OTHER; note = 2'-O-methyluridine
acaataaataccgaggaatgt

SEQ ID NO: 922 - RNA, 21 nt, synthetic construct
  source 1..21: mol_type = other RNA
  modified_base 1: mod_base = OTHER; note = 5'-phosphate-2'-O-methyladenosine-3'-phosphorothioate
  modified_base 2: mod_base = OTHER; note = 2'-fluoroadenosine-3'-phosphorothioate
  modified_base 3: mod_base = OTHER; note = 2'-O-methylcytidine-3'-phosphate
  modified_base 4: mod_base = OTHER; note = 2'-fluoroadenosine-3'-phosphate
  modified_base 5: mod_base = OTHER; note = 2'-O-methyladenosine-3'-phosphate
  modified_base 6: mod_base = OTHER; note = 2'-fluorouridine-3'-phosphate
  modified_base 7: mod_base = OTHER; note = 2'-O-methyladenosine-3'-phosphate
  modified_base 8: mod_base = OTHER; note = 2'-fluoroadenosine-3'-phosphate
  modified_base 9: mod_base = OTHER; note = 2'-O-methyladenosine-3'-phosphate
  modified_base 10: mod_base = OTHER; note = 2'-fluorouridine-3'-phosphate
  modified_base 11: mod_base = OTHER; note = 2'-O-methyladenosine-3'-phosphate
  modified_base 12: mod_base = OTHER; note = 2'-fluorocytidine-3'-phosphate
  modified_base 13: mod_base = OTHER; note = 2'-O-methylcytidine-3'-phosphate
  modified_base 14: mod_base = OTHER; note = 2'-fluoroguanosine-3'-phosphate
  modified_base 15: mod_base = OTHER; note = 2'-O-methyladenosine-3'-phosphate
  modified_base 16: mod_base = OTHER; note = 2'-fluoroguanosine-3'-phosphate
  modified_base 17: mod_base = OTHER; note = 2'-O-methylguanosine-3'-phosphate
  modified_base 18: mod_base = OTHER; note = 2'-fluoroadenosine-3'-phosphate
  modified_base 19: mod_base = OTHER; note = 2'-O-methyladenosine-3'-phosphorothioate
  modified_base 20: mod_base = OTHER; note = 2'-O-methyluridine-3'-phosphorothioate
  modified_base 21: mod_base = OTHER; note = 2'-O-methylguanosine
aacaataaataccgaggaatg

SEQ ID NO: 923 - RNA, 21 nt, synthetic construct
  source 1..21: mol_type = other RNA
  modified_base 1: mod_base = OTHER; note = 5'-phosphate-2'-O-methyladenosine-3'-phosphorothioate
  modified_base 2: mod_base = OTHER; note = 2'-fluorocytidine-3'-phosphorothioate
  modified_base 3: mod_base = OTHER; note = 2'-O-methyladenosine-3'-phosphate
  modified_base 4: mod_base = OTHER; note = 2'-fluoroguanosine-3'-phosphate
  modified_base 5: mod_base = OTHER; note = 2'-O-methyladenosine-3'-phosphate
  modified_base 6: mod_base = OTHER; note = 2'-fluorocytidine-3'-phosphate
  modified_base 7: mod_base = OTHER; note = 2'-O-methyladenosine-3'-phosphate
  modified_base 8: mod_base = OTHER; note = 2'-fluoroadenosine-3'-phosphate
  modified_base 9: mod_base = OTHER; note = 2'-O-methyluridine-3'-phosphate
  modified_base 10: mod_base = OTHER; note = 2'-fluoroadenosine-3'-phosphate
  modified_base 11: mod_base = OTHER; note = 2'-O-methyladenosine-3'-phosphate
  modified_base 12: mod_base = OTHER; note = 2'-fluoroadenosine-3'-phosphate
  modified_base 13: mod_base = OTHER; note = 2'-O-methyluridine-3'-phosphate
  modified_base 14: mod_base = OTHER; note = 2'-fluoroadenosine-3'-phosphate
  modified_base 15: mod_base = OTHER; note = 2'-O-methylcytidine-3'-phosphate
  modified_base 16: mod_base = OTHER; note = 2'-fluorocytidine-3'-phosphate
  modified_base 17: mod_base = OTHER; note = 2'-O-methylguanosine-3'-phosphate
  modified_base 18: mod_base = OTHER; note = 2'-fluoroadenosine-3'-phosphate
  modified_base 19: mod_base = OTHER; note = 2'-O-methylguanosine-3'-phosphorothioate
  modified_base 20: mod_base = OTHER; note = 2'-O-methylguanosine-3'-phosphorothioate
  modified_base 21: mod_base = OTHER; note = 2'-O-methyladenosine
acagacaataaataccgagga

SEQ ID NO: 924 - RNA, 21 nt, synthetic construct
  source 1..21: mol_type = other RNA
  modified_base 1: mod_base = OTHER; note = 5'-phosphate-2'-O-methyladenosine-3'-phosphorothioate
  modified_base 2: mod_base = OTHER; note = 2'-fluoroadenosine-3'-phosphorothioate
  modified_base 3: mod_base = OTHER; note = 2'-O-methylcytidine-3'-phosphate
  modified_base 4: mod_base = OTHER; note = 2'-fluoroadenosine-3'-phosphate
  modified_base 5: mod_base = OTHER; note = 2'-O-methylguanosine-3'-phosphate
  modified_base 6: mod_base = OTHER; note = 2'-fluoroadenosine-3'-phosphate
  modified_base 7: mod_base = OTHER; note = 2'-O-methylcytidine-3'-phosphate
  modified_base 8: mod_base = OTHER; note = 2'-fluoroadenosine-3'-phosphate
  modified_base 9: mod_base = OTHER; note = 2'-O-methyladenosine-3'-phosphate
  modified_base 10: mod_base = OTHER; note = 2'-fluorouridine-3'-phosphate
  modified_base 11: mod_base = OTHER; note = 2'-O-methyladenosine-3'-phosphate
  modified_base 12: mod_base = OTHER; note = 2'-fluoroadenosine-3'-phosphate
  modified_base 13: mod_base = OTHER; note = 2'-O-methyladenosine-3'-phosphate
  modified_base 14: mod_base = OTHER; note = 2'-fluorouridine-3'-phosphate
  modified_base 15: mod_base = OTHER; note = 2'-O-methyladenosine-3'-phosphate
  modified_base 16: mod_base = OTHER; note = 2'-fluorocytidine-3'-phosphate
  modified_base 17: mod_base = OTHER; note = 2'-O-methylcytidine-3'-phosphate
  modified_base 18: mod_base = OTHER; note = 2'-fluoroguanosine-3'-phosphate
  modified_base 19: mod_base = OTHER; note = 2'-O-methyladenosine-3'-phosphorothioate
  modified_base 20: mod_base = OTHER; note = 2'-O-methylguanosine-3'-phosphorothioate
  modified_base 21: mod_base = OTHER; note = 2'-O-methylguanosine
aacagacaataaataccgagg

SEQ ID NO: 925 - RNA, 21 nt, synthetic construct
  source 1..21: mol_type = other RNA
  modified_base 1: mod_base = OTHER; note = 5'-phosphate-2'-O-methyladenosine-3'-phosphorothioate
  modified_base 2: mod_base = OTHER; note = 2'-fluoroguanosine-3'-phosphorothioate
  modified_base 3: mod_base = OTHER; note = 2'-O-methyladenosine-3'-phosphate
  modified_base 4: mod_base = OTHER; note = 2'-fluorocytidine-3'-phosphate
  modified_base 5: mod_base = OTHER; note = 2'-O-methyladenosine-3'-phosphate
  modified_base 6: mod_base = OTHER; note = 2'-fluoroguanosine-3'-phosphate
  modified_base 7: mod_base = OTHER; note = 2'-O-methyladenosine-3'-phosphate
  modified_base 8: mod_base = OTHER; note = 2'-fluorocytidine-3'-phosphate
  modified_base 9: mod_base = OTHER; note = 2'-O-methyladenosine-3'-phosphate
  modified_base 10: mod_base = OTHER; note = 2'-fluoroadenosine-3'-phosphate
  modified_base 11: mod_base = OTHER; note = 2'-O-methyluridine-3'-phosphate
  modified_base 12: mod_base = OTHER; note = 2'-fluoroadenosine-3'-phosphate
  modified_base 13: mod_base = OTHER; note = 2'-O-methyladenosine-3'-phosphate
  modified_base 14: mod_base = OTHER; note = 2'-fluoroadenosine-3'-phosphate
  modified_base 15: mod_base = OTHER; note = 2'-O-methyluridine-3'-phosphate
  modified_base 16: mod_base = OTHER; note = 2'-fluoroadenosine-3'-phosphate
  modified_base 17: mod_base = OTHER; note = 2'-O-methylcytidine-3'-phosphate
  modified_base 18: mod_base = OTHER; note = 2'-fluorocytidine-3'-phosphate
  modified_base 19: mod_base = OTHER; note = 2'-O-methylguanosine-3'-phosphorothioate
  modified_base 20: mod_base = OTHER; note = 2'-O-methyladenosine-3'-phosphorothioate
  modified_base 21: mod_base = OTHER; note = 2'-O-methylguanosine
agacagacaataaataccgag

SEQ ID NO: 926 - RNA, 21 nt, synthetic construct
  source 1..21: mol_type = other RNA
  modified_base 1: mod_base = OTHER; note = 5'-phosphate-2'-O-methyluridine-3'-phosphorothioate
  modified_base 2: mod_base = OTHER; note = 2'-fluorocytidine-3'-phosphorothioate
  modified_base 3: mod_base = OTHER; note = 2'-O-methyladenosine-3'-phosphate
  modified_base 4: mod_base = OTHER; note = 2'-fluorocytidine-3'-phosphate
  modified_base 5: mod_base = OTHER; note = 2'-O-methylcytidine-3'-phosphate
  modified_base 6: mod_base = OTHER; note = 2'-fluoroadenosine-3'-phosphate
  modified_base 7: mod_base = OTHER; note = 2'-O-methylcytidine-3'-phosphate
  modified_base 8: mod_base = OTHER; note = 2'-fluoroguanosine-3'-phosphate
  modified_base 9: mod_base = OTHER; note = 2'-O-methyladenosine-3'-phosphate
  modified_base 10: mod_base = OTHER; note = 2'-fluorouridine-3'-phosphate
  modified_base 11: mod_base = OTHER; note = 2'-O-methylguanosine-3'-phosphate
  modified_base 12: mod_base = OTHER; note = 2'-fluoroguanosine-3'-phosphate
  modified_base 13: mod_base = OTHER; note = 2'-O-methylguanosine-3'-phosphate
  modified_base 14: mod_base = OTHER; note = 2'-fluorocytidine-3'-phosphate
  modified_base 15: mod_base = OTHER; note = 2'-O-methyluridine-3'-phosphate
  modified_base 16: mod_base = OTHER; note = 2'-fluorocytidine-3'-phosphate
  modified_base 17: mod_base = OTHER; note = 2'-O-methylcytidine-3'-phosphate
  modified_base 18: mod_base = OTHER; note = 2'-fluoroguanosine-3'-phosphate
  modified_base 19: mod_base = OTHER; note = 2'-O-methylcytidine-3'-phosphorothioate
  modified_base 20: mod_base = OTHER; note = 2'-O-methyluridine-3'-phosphorothioate
  modified_base 21: mod_base = OTHER; note = 2'-O-methylguanosine
tcaccacgatgggctccgctg

SEQ ID NO: 927 - RNA, 21 nt, synthetic construct
  source 1..21: mol_type = other RNA
  modified_base 1: mod_base = OTHER; note = 5'-phosphate-2'-O-methyladenosine-3'-phosphorothioate
  modified_base 2: mod_base = OTHER; note = 2'-fluorouridine-3'-phosphorothioate
  modified_base 3: mod_base = OTHER; note = 2'-O-methylcytidine-3'-phosphate
  modified_base 4: mod_base = OTHER; note = 2'-fluoroadenosine-3'-phosphate
  modified_base 5: mod_base = OTHER; note = 2'-O-methylcytidine-3'-phosphate
  modified_base 6: mod_base = OTHER; note = 2'-fluorocytidine-3'-phosphate
  modified_base 7: mod_base = OTHER; note = 2'-O-methyladenosine-3'-phosphate
  modified_base 8: mod_base = OTHER; note = 2'-fluorocytidine-3'-phosphate
  modified_base 9: mod_base = OTHER; note = 2'-O-methylguanosine-3'-phosphate
  modified_base 10: mod_base = OTHER; note = 2'-fluoroadenosine-3'-phosphate
  modified_base 11: mod_base = OTHER; note = 2'-O-methyluridine-3'-phosphate
  modified_base 12: mod_base = OTHER; note = 2'-fluoroguanosine-3'-phosphate
  modified_base 13: mod_base = OTHER; note = 2'-O-methylguanosine-3'-phosphate
  modified_base 14: mod_base = OTHER; note = 2'-fluoroguanosine-3'-phosphate
  modified_base 15: mod_base = OTHER; note = 2'-O-methylcytidine-3'-phosphate
  modified_base 16: mod_base = OTHER; note = 2'-fluorouridine-3'-phosphate
  modified_base 17: mod_base = OTHER; note = 2'-O-methylcytidine-3'-phosphate
  modified_base 18: mod_base = OTHER; note = 2'-fluorocytidine-3'-phosphate
  modified_base 19: mod_base = OTHER; note = 2'-O-methylguanosine-3'-phosphorothioate
  modified_base 20: mod_base = OTHER; note = 2'-O-methylcytidine-3'-phosphorothioate
  modified_base 21: mod_base = OTHER; note = 2'-O-methyluridine
atcaccacgatgggctccgct

SEQ ID NO: 928 - RNA, 21 nt, synthetic construct
  source 1..21: mol_type = other RNA
  modified_base 1: mod_base = OTHER; note = 5'-phosphate-2'-O-methyladenosine-3'-phosphorothioate
  modified_base 2: mod_base = OTHER; note = 2'-fluoroadenosine-3'-phosphorothioate
  modified_base 3: mod_base = OTHER; note = 2'-O-methylguanosine-3'-phosphate
  modified_base 4: mod_base = OTHER; note = 2'-fluorocytidine-3'-phosphate
  modified_base 5: mod_base = OTHER; note = 2'-O-methylcytidine-3'-phosphate
  modified_base 6: mod_base = OTHER; note = 2'-fluorouridine-3'-phosphate
  modified_base 7: mod_base = OTHER; note = 2'-O-methylcytidine-3'-phosphate
  modified_base 8: mod_base = OTHER; note = 2'-fluoroadenosine-3'-phosphate
  modified_base 9: mod_base = OTHER; note = 2'-O-methylcytidine-3'-phosphate
  modified_base 10: mod_base = OTHER; note = 2'-fluorocytidine-3'-phosphate
  modified_base 11: mod_base = OTHER; note = 2'-O-methyladenosine-3'-phosphate
  modified_base 12: mod_base = OTHER; note = 2'-fluorocytidine-3'-phosphate
  modified_base 13: mod_base = OTHER; note = 2'-O-methylguanosine-3'-phosphate
  modified_base 14: mod_base = OTHER; note = 2'-fluoroadenosine-3'-phosphate
  modified_base 15: mod_base = OTHER; note = 2'-O-methyluridine-3'-phosphate
  modified_base 16: mod_base = OTHER; note = 2'-fluoroguanosine-3'-phosphate
  modified_base 17: mod_base = OTHER; note = 2'-O-methylguanosine-3'-phosphate
  modified_base 18: mod_base = OTHER; note = 2'-fluoroguanosine-3'-phosphate
  modified_base 19: mod_base = OTHER; note = 2'-O-methylcytidine-3'-phosphorothioate
  modified_base 20: mod_base = OTHER; note = 2'-O-methyluridine-3'-phosphorothioate
  modified_base 21: mod_base = OTHER; note = 2'-O-methylcytidine
aagcctcaccacgatgggctc

SEQ ID NO: 929 - RNA, 21 nt, synthetic construct
  source 1..21: mol_type = other RNA
  modified_base 1: mod_base = OTHER; note = 5'-phosphate-2'-O-methyluridine-3'-phosphorothioate
  modified_base 2: mod_base = OTHER; note = 2'-fluoroadenosine-3'-phosphorothioate
  modified_base 3: mod_base = OTHER; note = 2'-O-methyladenosine-3'-phosphate
  modified_base 4: mod_base = OTHER; note = 2'-fluoroguanosine-3'-phosphate
  modified_base 5: mod_base = OTHER; note = 2'-O-methylcytidine-3'-phosphate
  modified_base 6: mod_base = OTHER; note = 2'-fluorocytidine-3'-phosphate
  modified_base 7: mod_base = OTHER; note = 2'-O-methyluridine-3'-phosphate
  modified_base 8: mod_base = OTHER; note = 2'-fluorocytidine-3'-phosphate
  modified_base 9: mod_base = OTHER; note = 2'-O-methyladenosine-3'-phosphate
  modified_base 10: mod_base = OTHER; note = 2'-fluorocytidine-3'-phosphate
  modified_base 11: mod_base = OTHER; note = 2'-O-methylcytidine-3'-phosphate
  modified_base 12: mod_base = OTHER; note = 2'-fluoroadenosine-3'-phosphate
  modified_base 13: mod_base = OTHER; note = 2'-O-methylcytidine-3'-phosphate
  modified_base 14: mod_base = OTHER; note = 2'-fluoroguanosine-3'-phosphate
  modified_base 15: mod_base = OTHER; note = 2'-O-methyladenosine-3'-phosphate
  modified_base 16: mod_base = OTHER; note = 2'-fluorouridine-3'-phosphate
  modified_base 17: mod_base = OTHER; note = 2'-O-methylguanosine-3'-phosphate
  modified_base 18: mod_base = OTHER; note = 2'-fluoroguanosine-3'-phosphate
  modified_base 19: mod_base = OTHER; note = 2'-O-methylguanosine-3'-phosphorothioate
  modified_base 20: mod_base = OTHER; note = 2'-O-methylcytidine-3'-phosphorothioate
  modified_base 21: mod_base = OTHER; note = 2'-O-methyluridine
taagcctcaccacgatgggct

SEQ ID NO: 930 - RNA, 21 nt, synthetic construct
  source 1..21: mol_type = other RNA
  modified_base 1: mod_base = OTHER; note = 5'-phosphate-2'-O-methyluridine-3'-phosphorothioate
  modified_base 2: mod_base = OTHER; note = 2'-fluorouridine-3'-phosphorothioate
  modified_base 3: mod_base = OTHER; note = 2'-O-methyladenosine-3'-phosphate
  modified_base 4: mod_base = OTHER; note = 2'-fluoroadenosine-3'-phosphate
  modified_base 5: mod_base = OTHER; note = 2'-O-methylguanosine-3'-phosphate
  modified_base 6: mod_base = OTHER; note = 2'-fluorocytidine-3'-phosphate
  modified_base 7: mod_base = OTHER; note = 2'-O-methylcytidine-3'-phosphate
  modified_base 8: mod_base = OTHER; note = 2'-fluorouridine-3'-phosphate
  modified_base 9: mod_base = OTHER; note = 2'-O-methylcytidine-3'-phosphate
  modified_base 10: mod_base = OTHER; note = 2'-fluoroadenosine-3'-phosphate
  modified_base 11: mod_base = OTHER; note = 2'-O-methylcytidine-3'-phosphate
  modified_base 12: mod_base = OTHER; note = 2'-fluorocytidine-3'-phosphate
  modified_base 13: mod_base = OTHER; note = 2'-O-methyladenosine-3'-phosphate
  modified_base 14: mod_base = OTHER; note = 2'-fluorocytidine-3'-phosphate
  modified_base 15: mod_base = OTHER; note = 2'-O-methylguanosine-3'-phosphate
  modified_base 16: mod_base = OTHER; note = 2'-fluoroadenosine-3'-phosphate
  modified_base 17: mod_base = OTHER; note = 2'-O-methyluridine-3'-phosphate
  modified_base 18: mod_base = OTHER; note = 2'-fluoroguanosine-3'-phosphate
  modified_base 19: mod_base = OTHER; note = 2'-O-methylguanosine-3'-phosphorothioate
  modified_base 20: mod_base = OTHER; note = 2'-O-methylguanosine-3'-phosphorothioate
  modified_base 21: mod_base = OTHER; note = 2'-O-methylcytidine
ttaagcctcaccacgatgggc

SEQ ID NO: 931 - RNA, 21 nt, synthetic construct
  source 1..21: mol_type = other RNA
  modified_base 1: mod_base = OTHER; note = 5'-phosphate-2'-O-methyladenosine-3'-phosphorothioate
  modified_base 2: mod_base = OTHER; note = 2'-fluorouridine-3'-phosphorothioate
  modified_base 3: mod_base = OTHER; note = 2'-O-methyluridine-3'-phosphate
  modified_base 4: mod_base = OTHER; note = 2'-fluoroadenosine-3'-phosphate
  modified_base 5: mod_base = OTHER; note = 2'-O-methyladenosine-3'-phosphate
  modified_base 6: mod_base = OTHER; note = 2'-fluoroguanosine-3'-phosphate
  modified_base 7: mod_base = OTHER; note = 2'-O-methylcytidine-3'-phosphate
  modified_base 8: mod_base = OTHER; note = 2'-fluorocytidine-3'-phosphate
  modified_base 9: mod_base = OTHER; note = 2'-O-methyluridine-3'-phosphate
  modified_base 10: mod_base = OTHER; note = 2'-fluorocytidine-3'-phosphate
  modified_base 11: mod_base = OTHER; note = 2'-O-methyladenosine-3'-phosphate
  modified_base 12: mod_base = OTHER; note = 2'-fluorocytidine-3'-phosphate
  modified_base 13: mod_base = OTHER; note = 2'-O-methylcytidine-3'-phosphate
  modified_base 14: mod_base = OTHER; note = 2'-fluoroadenosine-3'-phosphate
  modified_base 15: mod_base = OTHER; note = 2'-O-methylcytidine-3'-phosphate
  modified_base 16: mod_base = OTHER; note = 2'-fluoroguanosine-3'-phosphate
  modified_base 17: mod_base = OTHER; note = 2'-O-methyladenosine-3'-phosphate
  modified_base 18: mod_base = OTHER; note = 2'-fluorouridine-3'-phosphate
  modified_base 19: mod_base = OTHER; note = 2'-O-methylguanosine-3'-phosphorothioate
  modified_base 20: mod_base = OTHER; note = 2'-O-methylguanosine-3'-phosphorothioate
  modified_base 21: mod_base = OTHER; note = 2'-O-methylguanosine
attaagcctcaccacgatggg

SEQ ID NO: 932 - RNA, 21 nt, synthetic construct
  source 1..21: mol_type = other RNA
  modified_base 1: mod_base = OTHER; note = 5'-phosphate-2'-O-methyladenosine-3'-phosphorothioate
  modified_base 2: mod_base = OTHER; note = 2'-fluorouridine-3'-phosphorothioate
  modified_base 3: mod_base = OTHER; note = 2'-O-methylcytidine-3'-phosphate
  modified_base 4: mod_base = OTHER; note = 2'-fluorocytidine-3'-phosphate
  modified_base 5: mod_base = OTHER; note = 2'-O-methyluridine-3'-phosphate
  modified_base 6: mod_base = OTHER; note = 2'-fluorouridine-3'-phosphate
  modified_base 7: mod_base = OTHER; note = 2'-O-methyladenosine-3'-phosphate
  modified_base 8: mod_base = OTHER; note = 2'-fluoroadenosine-3'-phosphate
  modified_base 9: mod_base = OTHER; note = 2'-O-methylguanosine-3'-phosphate
  modified_base 10: mod_base = OTHER; note = 2'-fluorocytidine-3'-phosphate
  modified_base 11: mod_base = OTHER; note = 2'-O-methylcytidine-3'-phosphate
  modified_base 12: mod_base = OTHER; note = 2'-fluorouridine-3'-phosphate
  modified_base 13: mod_base = OTHER; note = 2'-O-methylcytidine-3'-phosphate
  modified_base 14: mod_base = OTHER; note = 2'-fluoroadenosine-3'-phosphate
  modified_base 15: mod_base = OTHER; note = 2'-O-methylcytidine-3'-phosphate
  modified_base 16: mod_base = OTHER; note = 2'-fluorocytidine-3'-phosphate
  modified_base 17: mod_base = OTHER; note = 2'-O-methyladenosine-3'-phosphate
  modified_base 18: mod_base = OTHER; note = 2'-fluorocytidine-3'-phosphate
  modified_base 19: mod_base = OTHER; note = 2'-O-methylguanosine-3'-phosphorothioate
  modified_base 20: mod_base = OTHER; note = 2'-O-methyladenosine-3'-phosphorothioate
  modified_base 21: mod_base = OTHER; note = 2'-O-methyluridine
atccttaagcctcaccacgat

SEQ ID NO: 933 - RNA, 21 nt, synthetic construct
  source 1..21: mol_type = other RNA
  modified_base 1: mod_base = OTHER; note = 5'-phosphate-2'-O-methyladenosine-3'-phosphorothioate
  modified_base 2: mod_base = OTHER; note = 2'-fluoroadenosine-3'-phosphorothioate
  modified_base 3: mod_base = OTHER; note = 2'-O-methylcytidine-3'-phosphate
  modified_base 4: mod_base = OTHER; note = 2'-fluorocytidine-3'-phosphate
  modified_base 5: mod_base = OTHER; note = 2'-O-methyluridine-3'-phosphate
  modified_base 6: mod_base = OTHER; note = 2'-fluorocytidine-3'-phosphate
  modified_base 7: mod_base = OTHER; note = 2'-O-methylcytidine-3'-phosphate
  modified_base 8: mod_base = OTHER; note = 2'-fluorouridine-3'-phosphate
  modified_base 9: mod_base = OTHER; note = 2'-O-methyluridine-3'-phosphate
  modified_base 10: mod_base = OTHER; note = 2'-fluoroadenosine-3'-phosphate
  modified_base 11: mod_base = OTHER; note = 2'-O-methyladenosine-3'-phosphate
  modified_base 12: mod_base = OTHER; note = 2'-fluoroguanosine-3'-phosphate
  modified_base 13: mod_base = OTHER; note = 2'-O-methylcytidine-3'-phosphate
  modified_base 14: mod_base = OTHER; note = 2'-fluorocytidine-3'-phosphate
  modified_base 15: mod_base = OTHER; note = 2'-O-methyluridine-3'-phosphate
  modified_base 16: mod_base = OTHER; note = 2'-fluorocytidine-3'-phosphate
  modified_base 17: mod_base = OTHER; note = 2'-O-methyladenosine-3'-phosphate
  modified_base 18: mod_base = OTHER; note = 2'-fluorocytidine-3'-phosphate
  modified_base 19: mod_base = OTHER; note = 2'-O-methylcytidine-3'-phosphorothioate
  modified_base 20: mod_base = OTHER; note = 2'-O-methyladenosine-3'-phosphorothioate
  modified_base 21: mod_base = OTHER; note = 2'-O-methylcytidine
aacctccttaagcctcaccac

SEQ ID NO: 934 - RNA, 21 nt, synthetic construct
  source 1..21: mol_type = other RNA
  modified_base 1: mod_base = OTHER; note = 5'-phosphate-2'-O-methyladenosine-3'-phosphorothioate
  modified_base 2: mod_base = OTHER; note = 2'-fluoroadenosine-3'-phosphorothioate
  modified_base 3: mod_base = OTHER; note = 2'-O-methyladenosine-3'-phosphate
  modified_base 4: mod_base = OTHER; note = 2'-fluorouridine-3'-phosphate
  modified_base 5: mod_base = OTHER; note = 2'-O-methylcytidine-3'-phosphate
  modified_base 6: mod_base = OTHER; note = 2'-fluorouridine-3'-phosphate
  modified_base 7: mod_base = OTHER; note = 2'-O-methylcytidine-3'-phosphate
  modified_base 8: mod_base = OTHER; note = 2'-fluoroguanosine-3'-phosphate
  modified_base 9: mod_base = OTHER; note = 2'-O-methyladenosine-3'-phosphate
  modified_base 10: mod_base = OTHER; note = 2'-fluoroadenosine-3'-phosphate
  modified_base 11: mod_base = OTHER; note = 2'-O-methylguanosine-3'-phosphate
  modified_base 12: mod_base = OTHER; note = 2'-fluorouridine-3'-phosphate
  modified_base 13: mod_base = OTHER; note = 2'-O-methylcytidine-3'-phosphate
  modified_base 14: mod_base = OTHER; note = 2'-fluoroguanosine-3'-phosphate
  modified_base 15: mod_base = OTHER; note = 2'-O-methyluridine-3'-phosphate
  modified_base 16: mod_base = OTHER; note = 2'-fluorocytidine-3'-phosphate
  modified_base 17: mod_base = OTHER; note = 2'-O-methylcytidine-3'-phosphate
  modified_base 18: mod_base = OTHER; note = 2'-fluorocytidine-3'-phosphate
  modified_base 19: mod_base = OTHER; note = 2'-O-methyluridine-3'-phosphorothioate
  modified_base 20: mod_base = OTHER; note = 2'-O-methylcytidine-3'-phosphorothioate
  modified_base 21: mod_base = OTHER; note = 2'-O-methyluridine
aaatctcgaagtcgtccctct

SEQ ID NO: 935 - RNA, 21 nt, synthetic construct
  source 1..21: mol_type = other RNA
  modified_base 1: mod_base = OTHER; note = 5'-phosphate-2'-O-methyladenosine-3'-phosphorothioate
  modified_base 2: mod_base = OTHER; note = 2'-fluoroadenosine-3'-phosphorothioate
  modified_base 3: mod_base = OTHER; note = 2'-O-methylguanosine-3'-phosphate
  modified_base 4: mod_base = OTHER; note = 2'-fluoroadenosine-3'-phosphate
  modified_base 5: mod_base = OTHER; note = 2'-O-methyladenosine-3'-phosphate
  modified_base 6: mod_base = OTHER; note = 2'-fluorouridine-3'-phosphate
  modified_base 7: mod_base = OTHER; note = 2'-O-methylcytidine-3'-phosphate
  modified_base 8: mod_base = OTHER; note = 2'-fluorouridine-3'-phosphate
  modified_base 9: mod_base = OTHER; note = 2'-O-methylcytidine-3'-phosphate
  modified_base 10: mod_base = OTHER; note = 2'-fluoroguanosine-3'-phosphate
  modified_base 11: mod_base = OTHER; note = 2'-O-methyladenosine-3'-phosphate
  modified_base 12: mod_base = OTHER; note = 2'-fluoroadenosine-3'-phosphate
  modified_base 13: mod_base = OTHER; note = 2'-O-methylguanosine-3'-phosphate
  modified_base 14: mod_base = OTHER; note = 2'-fluorouridine-3'-phosphate
  modified_base 15: mod_base = OTHER; note = 2'-O-methylcytidine-3'-phosphate
  modified_base 16: mod_base = OTHER; note = 2'-fluoroguanosine-3'-phosphate
  modified_base 17: mod_base = OTHER; note = 2'-O-methyluridine-3'-phosphate
  modified_base 18: mod_base = OTHER; note = 2'-fluorocytidine-3'-phosphate
  modified_base 19: mod_base = OTHER; note = 2'-O-methylcytidine-3'-phosphorothioate
  modified_base 20: mod_base = OTHER; note = 2'-O-methylcytidine-3'-phosphorothioate
  modified_base 21: mod_base = OTHER; note = 2'-O-methyluridine
aagaatctcgaagtcgtccct

SEQ ID NO: 936 - RNA, 21 nt, synthetic construct
  source 1..21: mol_type = other RNA
  modified_base 1: mod_base = OTHER; note = 5'-phosphate-2'-O-methyladenosine-3'-phosphorothioate
  modified_base 2: mod_base = OTHER; note = 2'-fluorouridine-3'-phosphorothioate
  modified_base 3: mod_base = OTHER; note = 2'-O-methyluridine-3'-phosphate
  modified_base 4: mod_base = OTHER; note = 2'-fluorocytidine-3'-phosphate
  modified_base 5: mod_base = OTHER; note = 2'-O-methyladenosine-3'-phosphate
  modified_base 6: mod_base = OTHER; note = 2'-fluoroguanosine-3'-phosphate
  modified_base 7: mod_base = OTHER; note = 2'-O-methyladenosine-3'-phosphate
  modified_base 8: mod_base = OTHER; note = 2'-fluoroadenosine-3'-phosphate
  modified_base 9: mod_base = OTHER; note = 2'-O-methyluridine-3'-phosphate
  modified_base 10: mod_base = OTHER; note = 2'-fluorocytidine-3'-phosphate
  modified_base 11: mod_base = OTHER; note = 2'-O-methyluridine-3'-phosphate
  modified_base 12: mod_base = OTHER; note = 2'-fluorocytidine-3'-phosphate
  modified_base 13: mod_base = OTHER; note = 2'-O-methylguanosine-3'-phosphate
  modified_base 14: mod_base = OTHER; note = 2'-fluoroadenosine-3'-phosphate
  modified_base 15: mod_base = OTHER; note = 2'-O-methyladenosine-3'-phosphate
  modified_base 16: mod_base = OTHER; note = 2'-fluoroguanosine-3'-phosphate
  modified_base 17: mod_base = OTHER; note = 2'-O-methyluridine-3'-phosphate
  modified_base 18: mod_base = OTHER; note = 2'-fluorocytidine-3'-phosphate
  modified_base 19: mod_base = OTHER; note = 2'-O-methylguanosine-3'-phosphorothioate
  modified_base 20: mod_base = OTHER; note = 2'-O-methyluridine-3'-phosphorothioate
  modified_base 21: mod_base = OTHER; note = 2'-O-methylcytidine
attcagaatctcgaagtcgtc

SEQ ID NO: 937 - RNA, 21 nt, synthetic construct
  source 1..21: mol_type = other RNA
  modified_base 1: mod_base = OTHER; note = 5'-phosphate-2'-O-methyladenosine-3'-phosphorothioate
  modified_base 2: mod_base = OTHER; note = 2'-fluoroadenosine-3'-phosphorothioate
  modified_base 3: mod_base = OTHER; note = 2'-O-methyluridine-3'-phosphate
  modified_base 4: mod_base = OTHER; note = 2'-fluorocytidine-3'-phosphate
  modified_base 5: mod_base = OTHER; note = 2'-O-methyladenosine-3'-phosphate
  modified_base 6: mod_base = OTHER; note = 2'-fluorocytidine-3'-phosphate
  modified_base 7: mod_base = OTHER; note = 2'-O-methylcytidine-3'-phosphate
  modified_base 8: mod_base = OTHER; note = 2'-fluorouridine-3'-phosphate
  modified_base 9: mod_base = OTHER; note = 2'-O-methyluridine-3'-phosphate
  modified_base 10: mod_base = OTHER; note = 2'-fluorocytidine-3'-phosphate
  modified_base 11: mod_base = OTHER; note = 2'-O-methyladenosine-3'-phosphate
  modified_base 12: mod_base = OTHER; note = 2'-fluoroguanosine-3'-phosphate
  modified_base 13: mod_base = OTHER; note = 2'-O-methyladenosine-3'-phosphate
  modified_base 14: mod_base = OTHER; note = 2'-fluoroadenosine-3'-phosphate
  modified_base 15: mod_base = OTHER; note = 2'-O-methyluridine-3'-phosphate
  modified_base 16: mod_base = OTHER; note = 2'-fluorocytidine-3'-phosphate
  modified_base 17: mod_base = OTHER; note = 2'-O-methyluridine-3'-phosphate
  modified_base 18: mod_base = OTHER; note = 2'-fluorocytidine-3'-phosphate
  modified_base 19: mod_base = OTHER; note = 2'-O-methylguanosine-3'-phosphorothioate
  modified_base 20: mod_base = OTHER; note = 2'-O-methyladenosine-3'-phosphorothioate
  modified_base 21: mod_base = OTHER; note = 2'-O-methyladenosine
aatcaccttcagaatctcgaa

SEQ ID NO: 938 - RNA, 21 nt, synthetic construct
  source 1..21: mol_type = other RNA
  modified_base 1: mod_base = OTHER; note = 5'-phosphate-2'-O-methyladenosine-3'-phosphorothioate
  modified_base 2: mod_base = OTHER; note = 2'-fluorouridine-3'-phosphorothioate
  modified_base 3: mod_base = OTHER; note = 2'-O-methylcytidine-3'-phosphate
  modified_base 4: mod_base = OTHER; note = 2'-fluorocytidine-3'-phosphate
  modified_base 5: mod_base = OTHER; note = 2'-O-methylguanosine-3'-phosphate
  modified_base 6: mod_base = OTHER; note = 2'-fluoroadenosine-3'-phosphate
  modified_base 7: mod_base = OTHER; note = 2'-O-methyluridine-3'-phosphate
  modified_base 8: mod_base = OTHER; note = 2'-fluorocytidine-3'-phosphate
  modified_base 9: mod_base = OTHER; note = 2'-O-methyladenosine-3'-phosphate
  modified_base 10: mod_base = OTHER; note = 2'-fluorocytidine-3'-phosphate
  modified_base 11: mod_base = OTHER; note = 2'-O-methylcytidine-3'-phosphate
  modified_base 12: mod_base = OTHER; note = 2'-fluorouridine-3'-phosphate
  modified_base 13: mod_base = OTHER; note = 2'-O-methyluridine-3'-phosphate
  modified_base 14: mod_base = OTHER; note = 2'-fluorocytidine-3'-phosphate
  modified_base 15: mod_base = OTHER; note = 2'-O-methyladenosine-3'-phosphate
  modified_base 16: mod_base = OTHER; note = 2'-fluoroguanosine-3'-phosphate
  modified_base 17: mod_base = OTHER; note = 2'-O-methyladenosine-3'-phosphate
  modified_base 18: mod_base = OTHER; note = 2'-fluoroadenosine-3'-phosphate
  modified_base 19: mod_base = OTHER; note = 2'-O-methyluridine-3'-phosphorothioate
  modified_base 20: mod_base = OTHER; note = 2'-O-methylcytidine-3'-phosphorothioate
  modified_base 21: mod_base = OTHER; note = 2'-O-methyluridine
atccgatcaccttcagaatct

SEQ ID NO: 939 - RNA, 21 nt, synthetic construct
  source 1..21: mol_type = other RNA
  modified_base 1: mod_base = OTHER; note = 5'-phosphate-2'-O-methyladenosine-3'-phosphorothioate
  modified_base 2: mod_base = OTHER; note = 2'-fluorouridine-3'-phosphorothioate
  modified_base 3: mod_base = OTHER; note = 2'-O-methylguanosine-3'-phosphate
  modified_base 4: mod_base = OTHER; note = 2'-fluoroguanosine-3'-phosphate
  modified_base 5: mod_base = OTHER; note = 2'-O-methylcytidine-3'-phosphate
  modified_base 6: mod_base = OTHER; note = 2'-fluorocytidine-3'-phosphate
  modified_base 7: mod_base = OTHER; note = 2'-O-methylcytidine-3'-phosphate
  modified_base 8: mod_base = OTHER; note = 2'-fluoroguanosine-3'-phosphate
  modified_base 9: mod_base = OTHER; note = 2'-O-methyluridine-3'-phosphate
  modified_base 10: mod_base = OTHER; note = 2'-fluorocytidine-3'-phosphate
  modified_base 11: mod_base = OTHER; note = 2'-O-methyluridine-3'-phosphate
  modified_base 12: mod_base = OTHER; note = 2'-fluoroguanosine-3'-phosphate
  modified_base 13: mod_base = OTHER; note = 2'-O-methylcytidine-3'-phosphate
  modified_base 14: mod_base = OTHER; note = 2'-fluorouridine-3'-phosphate
  modified_base 15: mod_base = OTHER; note = 2'-O-methyluridine-3'-phosphate
  modified_base 16: mod_base = OTHER; note = 2'-fluorocytidine-3'-phosphate
  modified_base 17: mod_base = OTHER; note = 2'-O-methyladenosine-3'-phosphate
  modified_base 18: mod_base = OTHER; note = 2'-fluorouridine-3'-phosphate
  modified_base 19: mod_base = OTHER; note = 2'-O-methylcytidine-3'-phosphorothioate
  modified_base 20: mod_base = OTHER; note = 2'-O-methyluridine-3'-phosphorothioate
  modified_base 21: mod_base = OTHER; note = 2'-O-methyluridine
atggcccgtctgcttcatctt

SEQ ID NO: 940 - RNA, 21 nt, synthetic construct
  source 1..21: mol_type = other RNA
  modified_base 1: mod_base = OTHER; note = 5'-phosphate-2'-O-methyluridine-3'-phosphorothioate
  modified_base 2: mod_base = OTHER; note = 2'-fluoroadenosine-3'-phosphorothioate
  modified_base 3: mod_base = OTHER; note = 2'-O-methylcytidine-3'-phosphate
  modified_base 4: mod_base = OTHER; note = 2'-fluoroadenosine-3'-phosphate
  modified_base 5: mod_base = OTHER; note = 2'-O-methylcytidine-3'-phosphate
  modified_base 6: mod_base = OTHER; note = 2'-fluorocytidine-3'-phosphate
  modified_base 7: mod_base = OTHER; note = 2'-O-methyluridine-3'-phosphate
  modified_base 8: mod_base = OTHER; note = 2'-fluoroguanosine-3'-phosphate
  modified_base 9: mod_base = OTHER; note = 2'-O-methylguanosine-3'-phosphate
  modified_base 10: mod_base = OTHER; note = 2'-fluorocytidine-3'-phosphate
  modified_base 11: mod_base = OTHER; note = 2'-O-methylcytidine-3'-phosphate
  modified_base 12: mod_base = OTHER; note = 2'-fluorocytidine-3'-phosphate
  modified_base 13: mod_base = OTHER; note = 2'-O-methylguanosine-3'-phosphate
  modified_base 14: mod_base = OTHER; note = 2'-fluorouridine-3'-phosphate
  modified_base 15: mod_base = OTHER; note = 2'-O-methylcytidine-3'-phosphate
  modified_base 16: mod_base = OTHER; note = 2'-fluorouridine-3'-phosphate
  modified_base 17: mod_base = OTHER; note = 2'-O-methylguanosine-3'-phosphate
  modified_base 18: mod_base = OTHER; note = 2'-fluorocytidine-3'-phosphate
  modified_base 19: mod_base = OTHER; note = 2'-O-methyluridine-3'-phosphorothioate
  modified_base 20: mod_base = OTHER; note = 2'-O-methyluridine-3'-phosphorothioate
  modified_base 21: mod_base = OTHER; note = 2'-O-methylcytidine
tacacctggcccgtctgcttc

SEQ ID NO: 941 - RNA, 21 nt, synthetic construct
  source 1..21: mol_type = other RNA
  modified_base 1: mod_base = OTHER; note = 5'-phosphate-2'-O-methyladenosine-3'-phosphorothioate
  modified_base 2: mod_base = OTHER; note = 2'-fluorouridine-3'-phosphorothioate
  modified_base 3: mod_base = OTHER; note = 2'-O-methyluridine-3'-phosphate
  modified_base 4: mod_base = OTHER; note = 2'-fluoroguanosine-3'-phosphate
  modified_base 5: mod_base = OTHER; note = 2'-O-methyluridine-3'-phosphate
  modified_base 6: mod_base = OTHER; note = 2'-fluorouridine-3'-phosphate
  modified_base 7: mod_base = OTHER; note = 2'-O-methylcytidine-3'-phosphate
  modified_base 8: mod_base = OTHER; note = 2'-fluoroadenosine-3'-phosphate
  modified_base 9: mod_base = OTHER; note = 2'-O-methyluridine-3'-phosphate
  modified_base 10: mod_base = OTHER; note = 2'-fluoroguanosine-3'-phosphate
  modified_base 11: mod_base = OTHER; note = 2'-O-methyladenosine-3'-phosphate
  modified_base 12: mod_base = OTHER; note = 2'-fluorouridine-3'-phosphate
  modified_base 13: mod_base = OTHER; note = 2'-O-methylcytidine-3'-phosphate
  modified_base 14: mod_base = OTHER; note = 2'-fluorouridine-3'-phosphate
  modified_base 15: mod_base = OTHER; note = 2'-O-methyluridine-3'-phosphate
  modified_base 16: mod_base = OTHER; note = 2'-fluorocytidine-3'-phosphate
  modified_base 17: mod_base = OTHER; note = 2'-O-methyladenosine-3'-phosphate
  modified_base 18: mod_base = OTHER; note = 2'-fluorouridine-3'-phosphate
  modified_base 19: mod_base = OTHER; note = 2'-O-methylguanosine-3'-phosphorothioate
  modified_base 20: mod_base = OTHER; note = 2'-O-methylguanosine-3'-phosphorothioate
  modified_base 21: mod_base = OTHER; note = 2'-O-methylcytidine
attgttcatgatcttcatggc

SEQ ID NO: 942 - RNA, 21 nt, synthetic construct
  source 1..21: mol_type = other RNA
  modified_base 1: mod_base = OTHER; note = 5'-phosphate-2'-O-methyladenosine-3'-phosphorothioate
  modified_base 2: mod_base = OTHER; note = 2'-fluoroadenosine-3'-phosphorothioate
  modified_base 3: mod_base = OTHER; note = 2'-O-methylcytidine-3'-phosphate
  modified_base 4: mod_base = OTHER; note = 2'-fluorouridine-3'-phosphate
  modified_base 5: mod_base = OTHER; note = 2'-O-methyluridine-3'-phosphate
  modified_base 6: mod_base = OTHER; note = 2'-fluoroguanosine-3'-phosphate
  modified_base 7: mod_base = OTHER; note = 2'-O-methyluridine-3'-phosphate
  modified_base 8: mod_base = OTHER; note = 2'-fluorouridine-3'-phosphate
  modified_base 9: mod_base = OTHER; note = 2'-O-methylcytidine-3'-phosphate
  modified_base 10: mod_base = OTHER; note = 2'-fluoroadenosine-3'-phosphate
  modified_base 11: mod_base = OTHER; note = 2'-O-methyluridine-3'-phosphate
  modified_base 12: mod_base = OTHER; note = 2'-fluoroguanosine-3'-phosphate
  modified_base 13: mod_base = OTHER; note = 2'-O-methyladenosine-3'-phosphate
  modified_base 14: mod_base = OTHER; note = 2'-fluorouridine-3'-phosphate
  modified_base 15: mod_base = OTHER; note = 2'-O-methylcytidine-3'-phosphate
  modified_base 16: mod_base = OTHER; note = 2'-fluorouridine-3'-phosphate
  modified_base 17: mod_base = OTHER; note = 2'-O-methyluridine-3'-phosphate
  modified_base 18: mod_base = OTHER; note = 2'-fluorocytidine-3'-phosphate
  modified_base 19: mod_base = OTHER; note = 2'-O-methyladenosine-3'-phosphorothioate
  modified_base 20: mod_base = OTHER; note = 2'-O-methyluridine-3'-phosphorothioate
  modified_base 21: mod_base = OTHER; note = 2'-O-methylguanosine
aacttgttcatgatcttcatg

SEQ ID NO: 943 - RNA, 21 nt, synthetic construct
  source 1..21: mol_type = other RNA
  modified_base 1: mod_base = OTHER; note = 5'-phosphate-2'-O-methyladenosine-3'-phosphorothioate
  modified_base 2: mod_base = OTHER; note = 2'-fluoroadenosine-3'-phosphorothioate
  modified_base 3: mod_base = OTHER; note = 2'-O-methyluridine-3'-phosphate
  modified_base 4: mod_base = OTHER; note = 2'-fluoroguanosine-3'-phosphate
  modified_base 5: mod_base = OTHER; note = 2'-O-methyluridine-3'-phosphate
  modified_base 6: mod_base = OTHER; note = 2'-fluorocytidine-3'-phosphate
  modified_base 7: mod_base = OTHER; note = 2'-O-methylcytidine-3'-phosphate
  modified_base 8: mod_base = OTHER; note = 2'-fluorocytidine-3'-phosphate
  modified_base 9: mod_base = OTHER; note = 2'-O-methyladenosine-3'-phosphate
  modified_base 10: mod_base = OTHER; note = 2'-fluorocytidine-3'-phosphate
  modified_base 11: mod_base = OTHER; note = 2'-O-methyluridine-3'-phosphate
  modified_base 12: mod_base = OTHER; note = 2'-fluorouridine-3'-phosphate
  modified_base 13: mod_base = OTHER; note = 2'-O-methylguanosine-3'-phosphate
  modified_base 14: mod_base = OTHER; note = 2'-fluorouridine-3'-phosphate
  modified_base 15: mod_base = OTHER; note = 2'-O-methyluridine-3'-phosphate
  modified_base 16: mod_base = OTHER; note = 2'-fluorocytidine-3'-phosphate
  modified_base 17: mod_base = OTHER; note = 2'-O-methyladenosine-3'-phosphate
  modified_base 18: mod_base = OTHER; note = 2'-fluorouridine-3'-phosphate
  modified_base 19: mod_base = OTHER; note = 2'-O-methylguanosine-3'-phosphorothioate
  modified_base 20: mod_base = OTHER; note = 2'-O-methyladenosine-3'-phosphorothioate
  modified_base 21: mod_base = OTHER; note = 2'-O-methyluridine
aatgtcccacttgttcatgat

SEQ ID NO: 944 - RNA, 21 nt, synthetic construct
  source 1..21: mol_type = other RNA
  modified_base 1: mod_base = OTHER; note = 5'-phosphate-2'-O-methyladenosine-3'-phosphorothioate
  modified_base 2: mod_base = OTHER; note = 2'-fluorouridine-3'-phosphorothioate
  modified_base 3: mod_base = OTHER; note = 2'-O-methyluridine-3'-phosphate
  modified_base 4: mod_base = OTHER; note = 2'-fluorocytidine-3'-phosphate
  modified_base 5: mod_base = OTHER; note = 2'-O-methyladenosine-3'-phosphate
  modified_base 6: mod_base = OTHER; note = 2'-fluoroguanosine-3'-phosphate
  modified_base 7: mod_base = OTHER; note = 2'-O-methylcytidine-3'-phosphate
  modified_base 8: mod_base = OTHER; note = 2'-fluoroadenosine-3'-phosphate
  modified_base 9: mod_base = OTHER; note = 2'-O-methyluridine-3'-phosphate
  modified_base 10: mod_base = OTHER; note = 2'-fluoroguanosine-3'-phosphate
  modified_base 11: mod_base = OTHER; note = 2'-O-methyluridine-3'-phosphate
  modified_base 12: mod_base = OTHER; note = 2'-fluorocytidine-3'-phosphate
  modified_base 13: mod_base = OTHER; note = 2'-O-methylcytidine-3'-phosphate
  modified_base 14: mod_base = OTHER; note = 2'-fluorocytidine-3'-phosphate
  modified_base 15: mod_base = OTHER; note = 2'-O-methyladenosine-3'-phosphate
  modified_base 16: mod_base = OTHER; note = 2'-fluorocytidine-3'-phosphate
  modified_base 17: mod_base = OTHER; note = 2'-O-methyluridine-3'-phosphate
  modified_base 18: mod_base = OTHER; note = 2'-fluorouridine-3'-phosphate
  modified_base 19: mod_base = OTHER; note = 2'-O-methylguanosine-3'-phosphorothioate
  modified_base 20: mod_base = OTHER; note = 2'-O-methyluridine-3'-phosphorothioate
  modified_base 21: mod_base = OTHER; note = 2'-O-methyluridine
attcagcatgtcccacttgtt

SEQ ID NO: 945 - RNA, 21 nt, synthetic construct
  source 1..21: mol_type = other RNA
  modified_base 1: mod_base = OTHER; note = 5'-phosphate-2'-O-methyladenosine-3'-phosphorothioate
  modified_base 2: mod_base = OTHER; note = 2'-fluoroadenosine-3'-phosphorothioate
  modified_base 3: mod_base = OTHER; note = 2'-O-methylcytidine-3'-phosphate
  modified_base 4: mod_base = OTHER; note = 2'-fluoroguanosine-3'-phosphate
  modified_base 5: mod_base = OTHER; note = 2'-O-methylguanosine-3'-phosphate
  modified_base 6: mod_base = OTHER; note = 2'-fluoroadenosine-3'-phosphate
  modified_base 7: mod_base = OTHER; note = 2'-O-methyladenosine-3'-phosphate
  modified_base 8: mod_base = OTHER; note = 2'-fluoroguanosine-3'-phosphate
  modified_base 9: mod_base = OTHER; note = 2'-O-methylcytidine-3'-phosphate
  modified_base 10: mod_base = OTHER; note = 2'-fluoroadenosine-3'-phosphate
  modified_base 11: mod_base = OTHER; note = 2'-O-methylcytidine-3'-phosphate
  modified_base 12: mod_base = OTHER; note = 2'-fluoroguanosine-3'-phosphate
  modified_base 13: mod_base = OTHER; note = 2'-O-methyladenosine-3'-phosphate
  modified_base 14: mod_base = OTHER; note = 2'-fluorocytidine-3'-phosphate
  modified_base 15: mod_base = OTHER; note = 2'-O-methyladenosine-3'-phosphate
  modified_base 16: mod_base = OTHER; note = 2'-fluorocytidine-3'-phosphate
  modified_base 17: mod_base = OTHER; note = 2'-O-methylcytidine-3'-phosphate
  modified_base 18: mod_base = OTHER; note = 2'-fluorouridine-3'-phosphate
  modified_base 19: mod_base = OTHER; note = 2'-O-methylcytidine-3'-phosphorothioate
  modified_base 20: mod_base = OTHER; note = 2'-O-methylguanosine-3'-phosphorothioate
  modified_base 21: mod_base = OTHER; note = 2'-O-methylcytidine
aacggaagcacgacacctcgc

SEQ ID NO: 946 - RNA, 21 nt, synthetic construct
  source 1..21: mol_type = other RNA
  modified_base 1: mod_base = OTHER; note = 5'-phosphate-2'-O-methyladenosine-3'-phosphorothioate
  modified_base 2: mod_base = OTHER; note = 2'-fluorouridine-3'-phosphorothioate
  modified_base 3: mod_base = OTHER; note = 2'-O-methylcytidine-3'-phosphate
  modified_base 4: mod_base = OTHER; note = 2'-fluoroadenosine-3'-phosphate
  modified_base 5: mod_base = OTHER; note = 2'-O-methylcytidine-3'-phosphate
  modified_base 6: mod_base = OTHER; note = 2'-fluoroguanosine-3'-phosphate
  modified_base 7: mod_base = OTHER; note = 2'-O-methylguanosine-3'-phosphate
  modified_base 8: mod_base = OTHER; note = 2'-fluoroadenosine-3'-phosphate
  modified_base 9: mod_base = OTHER; note = 2'-O-methyladenosine-3'-phosphate
  modified_base 10: mod_base = OTHER; note = 2'-fluoroguanosine-3'-phosphate
  modified_base 11: mod_base = OTHER; note = 2'-O-methylcytidine-3'-phosphate
  modified_base 12: mod_base = OTHER; note = 2'-fluoroadenosine-3'-phosphate
  modified_base 13: mod_base = OTHER; note = 2'-O-methylcytidine-3'-phosphate
  modified_base 14: mod_base = OTHER; note = 2'-fluoroguanosine-3'-phosphate
  modified_base 15: mod_base = OTHER; note = 2'-O-methyladenosine-3'-phosphate
  modified_base 16: mod_base = OTHER; note = 2'-fluorocytidine-3'-phosphate
  modified_base 17: mod_base = OTHER; note = 2'-O-methyladenosine-3'-phosphate
  modified_base 18: mod_base = OTHER; note = 2'-fluorocytidine-3'-phosphate
  modified_base 19: mod_base = OTHER; note = 2'-O-methylcytidine-3'-phosphorothioate
  modified_base 20: mod_base = OTHER; note = 2'-O-methyluridine-3'-phosphorothioate
  modified_base 21: mod_base = OTHER; note = 2'-O-methylcytidine
atcacggaagcacgacacctc

SEQ ID NO: 947 - RNA, 21 nt, synthetic construct
  source 1..21: mol_type = other RNA
  modified_base 1: mod_base = OTHER; note = 5'-phosphate-2'-O-methyladenosine-3'-phosphorothioate
  modified_base 2: mod_base = OTHER; note = 2'-fluorouridine-3'-phosphorothioate
  modified_base 3: mod_base = OTHER; note = 2'-O-methylcytidine-3'-phosphate
  modified_base 4: mod_base = OTHER; note = 2'-fluorouridine-3'-phosphate
  modified_base 5: mod_base = OTHER; note = 2'-O-methylcytidine-3'-phosphate
  modified_base 6: mod_base = OTHER; note = 2'-fluorocytidine-3'-phosphate
  modified_base 7: mod_base = OTHER; note = 2'-O-methyluridine-3'-phosphate
  modified_base 8: mod_base = OTHER; note = 2'-fluorocytidine-3'-phosphate
  modified_base 9: mod_base = OTHER; note = 2'-O-methyladenosine-3'-phosphate
  modified_base 10: mod_base = OTHER; note = 2'-fluorocytidine-3'-phosphate
  modified_base 11: mod_base = OTHER; note = 2'-O-methylguanosine-3'-phosphate
  modified_base 12: mod_base = OTHER; note = 2'-fluoroguanosine-3'-phosphate
  modified_base 13: mod_base = OTHER; note = 2'-O-methyladenosine-3'-phosphate
  modified_base 14: mod_base = OTHER; note = 2'-fluoroadenosine-3'-phosphate
  modified_base 15: mod_base = OTHER; note = 2'-O-methylguanosine-3'-phosphate
  modified_base 16: mod_base = OTHER; note = 2'-fluorocytidine-3'-phosphate
  modified_base 17: mod_base = OTHER; note = 2'-O-methyladenosine-3'-phosphate
  modified_base 18: mod_base = OTHER; note = 2'-fluorocytidine-3'-phosphate
  modified_base 19: mod_base = OTHER; note = 2'-O-methylguanosine-3'-phosphorothioate
  modified_base 20: mod_base = OTHER; note = 2'-O-methyladenosine-3'-phosphorothioate
  modified_base 21: mod_base = OTHER; note = 2'-O-methylcytidine
atctcctcacggaagcacgac

SEQ ID NO: 948 - RNA, 21 nt, synthetic construct
  source 1..21: mol_type = other RNA
  modified_base 1: mod_base = OTHER; note = 5'-phosphate-2'-O-methyladenosine-3'-phosphorothioate
  modified_base 2: mod_base = OTHER; note = 2'-fluoroadenosine-3'-phosphorothioate
  modified_base 3: mod_base = OTHER; note = 2'-O-methylcytidine-3'-phosphate
  modified_base 4: mod_base = OTHER; note = 2'-fluoroguanosine-3'-phosphate
  modified_base 5: mod_base = OTHER; note = 2'-O-methyluridine-3'-phosphate
  modified_base 6: mod_base = OTHER; note = 2'-fluorocytidine-3'-phosphate
  modified_base 7: mod_base = OTHER; note = 2'-O-methylcytidine-3'-phosphate
  modified_base 8: mod_base = OTHER; note = 2'-fluorocytidine-3'-phosphate
  modified_base 9: mod_base = OTHER; note = 2'-O-methyluridine-3'-phosphate
  modified_base 10: mod_base = OTHER; note = 2'-fluorocytidine-3'-phosphate
  modified_base 11: mod_base = OTHER; note = 2'-O-methyluridine-3'-phosphate
  modified_base 12: mod_base = OTHER; note = 2'-fluorocytidine-3'-phosphate
  modified_base 13: mod_base = OTHER; note = 2'-O-methylcytidine-3'-phosphate
  modified_base 14: mod_base = OTHER; note = 2'-fluorouridine-3'-phosphate
  modified_base 15: mod_base = OTHER; note = 2'-O-methylcytidine-3'-phosphate
  modified_base 16: mod_base = OTHER; note = 2'-fluoroadenosine-3'-phosphate
  modified_base 17: mod_base = OTHER; note = 2'-O-methylcytidine-3'-phosphate
  modified_base 18: mod_base = OTHER; note = 2'-fluoroguanosine-3'-phosphate
  modified_base 19: mod_base = OTHER; note = 2'-O-methylguanosine-3'-phosphorothioate
  modified_base 20: mod_base = OTHER; note = 2'-O-methyladenosine-3'-phosphorothioate
  modified_base 21: mod_base = OTHER; note = 2'-O-methyladenosine
aacgtccctctcctcacggaa

SEQ ID NO: 949 - RNA, 21 nt, synthetic construct
  source 1..21: mol_type = other RNA
  modified_base 1: mod_base = OTHER; note = 5'-phosphate-2'-O-methyladenosine-3'-phosphorothioate
  modified_base 2: mod_base = OTHER; note = 2'-fluoroadenosine-3'-phosphorothioate
  modified_base 3: mod_base = OTHER; note = 2'-O-methylcytidine-3'-phosphate
  modified_base 4: mod_base = OTHER; note = 2'-fluoroadenosine-3'-phosphate
  modified_base 5: mod_base = OTHER; note = 2'-O-methylcytidine-3'-phosphate
  modified_base 6: mod_base = OTHER; note = 2'-fluoroguanosine-3'-phosphate
  modified_base 7: mod_base = OTHER; note = 2'-O-methyluridine-3'-phosphate
  modified_base 8: mod_base = OTHER; note = 2'-fluorocytidine-3'-phosphate
  modified_base 9: mod_base = OTHER; note = 2'-O-methylcytidine-3'-phosphate
  modified_base 10: mod_base = OTHER; note = 2'-fluorocytidine-3'-phosphate
  modified_base 11: mod_base = OTHER; note = 2'-O-methyluridine-3'-phosphate
  modified_base 12: mod_base = OTHER; note = 2'-fluorocytidine-3'-phosphate
  modified_base 13: mod_base = OTHER; note = 2'-O-methyluridine-3'-phosphate
  modified_base 14: mod_base = OTHER; note = 2'-fluorocytidine-3'-phosphate
  modified_base 15: mod_base = OTHER; note = 2'-O-methylcytidine-3'-phosphate
  modified_base 16: mod_base = OTHER; note = 2'-fluorouridine-3'-phosphate
  modified_base 17: mod_base = OTHER; note = 2'-O-methylcytidine-3'-phosphate
  modified_base 18: mod_base = OTHER; note = 2'-fluoroadenosine-3'-phosphate
  modified_base 19: mod_base = OTHER; note = 2'-O-methylcytidine-3'-phosphorothioate
  modified_base 20: mod_base = OTHER; note = 2'-O-methylguanosine-3'-phosphorothioate
  modified_base 21: mod_base = OTHER; note = 2'-O-methylguanosine
aacacgtccctctcctcacgg

SEQ ID NO: 950 - RNA, 21 nt, synthetic construct
  source 1..21: mol_type = other RNA
  modified_base 1: mod_base = OTHER; note = 5'-phosphate-2'-O-methyluridine-3'-phosphorothioate
  modified_base 2: mod_base = OTHER; note = 2'-fluorouridine-3'-phosphorothioate
  modified_base 3: mod_base = OTHER; note = 2'-O-methylcytidine-3'-phosphate
  modified_base 4: mod_base = OTHER; note = 2'-fluoroadenosine-3'-phosphate
  modified_base 5: mod_base = OTHER; note = 2'-O-methylcytidine-3'-phosphate
  modified_base 6: mod_base = OTHER; note = 2'-fluorocytidine-3'-phosphate
  modified_base 7: mod_base = OTHER; note = 2'-O-methyladenosine-3'-phosphate
  modified_base 8: mod_base = OTHER; note = 2'-fluoroadenosine-3'-phosphate
  modified_base 9: mod_base = OTHER; note = 2'-O-methylcytidine-3'-phosphate
  modified_base 10: mod_base = OTHER; note = 2'-fluoroadenosine-3'-phosphate
  modified_base 11: mod_base = OTHER; note = 2'-O-methylcytidine-3'-phosphate
  modified_base 12: mod_base = OTHER; note = 2'-fluoroguanosine-3'-phosphate
  modified_base 13: mod_base = OTHER; note = 2'-O-methyluridine-3'-phosphate
  modified_base 14: mod_base = OTHER; note = 2'-fluorocytidine-3'-phosphate
  modified_base 15: mod_base = OTHER; note = 2'-O-methylcytidine-3'-phosphate
  modified_base 16: mod_base = OTHER; note = 2'-fluorocytidine-3'-phosphate
  modified_base 17: mod_base = OTHER; note = 2'-O-methyluridine-3'-phosphate
  modified_base 18: mod_base = OTHER; note = 2'-fluorocytidine-3'-phosphate
  modified_base 19: mod_base = OTHER; note = 2'-O-methyluridine-3'-phosphorothioate
  modified_base 20: mod_base = OTHER; note = 2'-O-methylcytidine-3'-phosphorothioate
  modified_base 21: mod_base = OTHER; note = 2'-O-methylcytidine
ttcaccaacacgtccctctcc

SEQ ID NO: 951 - RNA, 21 nt, synthetic construct
  source 1..21: mol_type = other RNA
  modified_base 1: mod_base = OTHER; note = 5'-phosphate-2'-O-methyladenosine-3'-phosphorothioate
  modified_base 2: mod_base = OTHER; note = 2'-fluorouridine-3'-phosphorothioate
  modified_base 3: mod_base = OTHER; note = 2'-O-methyluridine-3'-phosphate
  modified_base 4: mod_base = OTHER; note = 2'-fluorocytidine-3'-phosphate
  modified_base 5: mod_base = OTHER; note = 2'-O-methyladenosine-3'-phosphate
  modified_base 6: mod_base = OTHER; note = 2'-fluorocytidine-3'-phosphate
  modified_base 7: mod_base = OTHER; note = 2'-O-methylcytidine-3'-phosphate
  modified_base 8: mod_base = OTHER; note = 2'-fluoroadenosine-3'-phosphate
  modified_base 9: mod_base = OTHER; note = 2'-O-methyladenosine-3'-phosphate
  modified_base 10: mod_base = OTHER; note = 2'-fluorocytidine-3'-phosphate
  modified_base 11: mod_base = OTHER; note = 2'-O-methyladenosine-3'-phosphate
  modified_base 12: mod_base = OTHER; note = 2'-fluorocytidine-3'-phosphate
  modified_base 13: mod_base = OTHER; note = 2'-O-methylguanosine-3'-phosphate
  modified_base 14: mod_base = OTHER; note = 2'-fluorouridine-3'-phosphate
  modified_base 15: mod_base = OTHER; note = 2'-O-methylcytidine-3'-phosphate
  modified_base 16: mod_base = OTHER; note = 2'-fluorocytidine-3'-phosphate
  modified_base 17: mod_base = OTHER; note = 2'-O-methylcytidine-3'-phosphate
  modified_base 18: mod_base = OTHER; note = 2'-fluorouridine-3'-phosphate
  modified_base 19: mod_base = OTHER; note = 2'-O-methylcytidine-3'-phosphorothioate
  modified_base 20: mod_base = OTHER; note = 2'-O-methyluridine-3'-phosphorothioate
  modified_base 21: mod_base = OTHER; note = 2'-O-methylcytidine
attcaccaacacgtccctctc

SEQ ID NO: 952 - RNA, 21 nt, synthetic construct
  source 1..21: mol_type = other RNA
  modified_base 1: mod_base = OTHER; note = 5'-phosphate-2'-O-methylcytidine-3'-phosphorothioate
  modified_base 2: mod_base = OTHER; note = 2'-fluoroadenosine-3'-phosphorothioate
  modified_base 3: mod_base = OTHER; note = 2'-O-methyluridine-3'-phosphate
  modified_base 4: mod_base = OTHER; note = 2'-fluorouridine-3'-phosphate
  modified_base 5: mod_base = OTHER; note = 2'-O-methylcytidine-3'-phosphate
  modified_base 6: mod_base = OTHER; note = 2'-fluoroadenosine-3'-phosphate
  modified_base 7: mod_base = OTHER; note = 2'-O-methylcytidine-3'-phosphate
  modified_base 8: mod_base = OTHER; note = 2'-fluorocytidine-3'-phosphate
  modified_base 9: mod_base = OTHER; note = 2'-O-methyladenosine-3'-phosphate
  modified_base 10: mod_base = OTHER; note = 2'-fluoroadenosine-3'-phosphate
  modified_base 11: mod_base = OTHER; note = 2'-O-methylcytidine-3'-phosphate
  modified_base 12: mod_base = OTHER; note = 2'-fluoroadenosine-3'-phosphate
  modified_base 13: mod_base = OTHER; note = 2'-O-methylcytidine-3'-phosphate
  modified_base 14: mod_base = OTHER; note = 2'-fluoroguanosine-3'-phosphate
  modified_base 15: mod_base = OTHER; note = 2'-O-methyluridine-3'-phosphate
  modified_base 16: mod_base = OTHER; note = 2'-fluorocytidine-3'-phosphate
  modified_base 17: mod_base = OTHER; note = 2'-O-methylcytidine-3'-phosphate
  modified_base 18: mod_base = OTHER; note = 2'-fluorocytidine-3'-phosphate
  modified_base 19: mod_base = OTHER; note = 2'-O-methyluridine-3'-phosphorothioate
  modified_base 20: mod_base = OTHER; note = 2'-O-methylcytidine-3'-phosphorothioate
  modified_base 21: mod_base = OTHER; note = 2'-O-methyluridine
cattcaccaacacgtccctct

SEQ ID NO: 953 - RNA, 21 nt, synthetic construct
  source 1..21: mol_type = other RNA
  modified_base 1: mod_base = OTHER; note = 5'-phosphate-2'-O-methyluridine-3'-phosphorothioate
  modified_base 2: mod_base = OTHER; note = 2'-fluoroguanosine-3'-phosphorothioate
  modified_base 3: mod_base = OTHER; note = 2'-O-methylcytidine-3'-phosphate
  modified_base 4: mod_base = OTHER; note = 2'-fluoroadenosine-3'-phosphate
  modified_base 5: mod_base = OTHER; note = 2'-O-methylguanosine-3'-phosphate
  modified_base 6: mod_base = OTHER; note = 2'-fluorocytidine-3'-phosphate
  modified_base 7: mod_base = OTHER; note = 2'-O-methyluridine-3'-phosphate
  modified_base 8: mod_base = OTHER; note = 2'-fluoroguanosine-3'-phosphate
  modified_base 9: mod_base = OTHER; note = 2'-O-methylcytidine-3'-phosphate
  modified_base 10: mod_base = OTHER; note = 2'-fluoroguanosine-3'-phosphate
  modified_base 11: mod_base = OTHER; note = 2'-O-methyluridine-3'-phosphate
  modified_base 12: mod_base = OTHER; note = 2'-fluoroguanosine-3'-phosphate
  modified_base 13: mod_base = OTHER; note = 2'-O-methyladenosine-3'-phosphate
  modified_base 14: mod_base = OTHER; note = 2'-fluorouridine-3'-phosphate
  modified_base 15: mod_base = OTHER; note = 2'-O-methylcytidine-3'-phosphate
  modified_base 16: mod_base = OTHER; note = 2'-fluorocytidine-3'-phosphate
  modified_base 17: mod_base = OTHER; note = 2'-O-methyladenosine-3'-phosphate
  modified_base 18: mod_base = OTHER; note = 2'-fluorocytidine-3'-phosphate
  modified_base 19: mod_base = OTHER; note = 2'-O-methylcytidine-3'-phosphorothioate
  modified_base 20: mod_base = OTHER; note = 2'-O-methylguanosine-3'-phosphorothioate
  modified_base 21: mod_base = OTHER; note = 2'-O-methylcytidine
tgcagctgcgtgatccaccgc

SEQ ID NO: 954 - RNA, 21 nt, synthetic construct
  source 1..21: mol_type = other RNA
  modified_base 1: mod_base = OTHER; note = 5'-phosphate-2'-O-methyluridine-3'-phosphorothioate
  modified_base 2: mod_base = OTHER; note = 2'-fluorouridine-3'-phosphorothioate
  modified_base 3: mod_base = OTHER; note = 2'-O-methylcytidine-3'-phosphate
  modified_base 4: mod_base = OTHER; note = 2'-fluorouridine-3'-phosphate
  modified_base 5: mod_base = OTHER; note = 2'-O-methylcytidine-3'-phosphate
  modified_base 6: mod_base = OTHER; note = 2'-fluoroadenosine-3'-phosphate
  modified_base 7: mod_base = OTHER; note = 2'-O-methyluridine-3'-phosphate
  modified_base 8: mod_base = OTHER; note = 2'-fluorocytidine-3'-phosphate
  modified_base 9: mod_base = OTHER; note = 2'-O-methylcytidine-3'-phosphate
  modified_base 10: mod_base = OTHER; note = 2'-fluorouridine-3'-phosphate
  modified_base 11: mod_base = OTHER; note = 2'-O-methylguanosine-3'-phosphate
  modified_base 12: mod_base = OTHER; note = 2'-fluoroguanosine-3'-phosphate
  modified_base 13: mod_base = OTHER; note = 2'-O-methyladenosine-3'-phosphate
  modified_base 14: mod_base = OTHER; note = 2'-fluoroadenosine-3'-phosphate
  modified_base 15: mod_base = OTHER; note = 2'-O-methylguanosine-3'-phosphate
  modified_base 16: mod_base = OTHER; note = 2'-fluoroguanosine-3'-phosphate
  modified_base 17: mod_base = OTHER; note = 2'-O-methylcytidine-3'-phosphate
  modified_base 18: mod_base = OTHER; note = 2'-fluoroguanosine-3'-phosphate
  modified_base 19: mod_base = OTHER; note = 2'-O-methyladenosine-3'-phosphorothioate
  modified_base 20: mod_base = OTHER; note = 2'-O-methyladenosine-3'-phosphorothioate
  modified_base 21: mod_base = OTHER; note = 2'-O-methylguanosine
ttctcatcctggaaggcgaag

SEQ ID NO: 955 - RNA, 21 nt, synthetic construct
  source 1..21: mol_type = other RNA
  modified_base 1: mod_base = OTHER; note = 5'-phosphate-2'-O-methyladenosine-3'-phosphorothioate
  modified_base 2: mod_base = OTHER; note = 2'-fluorouridine-3'-phosphorothioate
  modified_base 3: mod_base = OTHER; note = 2'-O-methyluridine-3'-phosphate
  modified_base 4: mod_base = OTHER; note = 2'-fluorocytidine-3'-phosphate
  modified_base 5: mod_base = OTHER; note = 2'-O-methyluridine-3'-phosphate
  modified_base 6: mod_base = OTHER; note = 2'-fluorocytidine-3'-phosphate
  modified_base 7: mod_base = OTHER; note = 2'-O-methyladenosine-3'-phosphate
  modified_base 8: mod_base = OTHER; note = 2'-fluorouridine-3'-phosphate
  modified_base 9: mod_base = OTHER; note = 2'-O-methylcytidine-3'-phosphate
  modified_base 10: mod_base = OTHER; note = 2'-fluorocytidine-3'-phosphate
  modified_base 11: mod_base = OTHER; note = 2'-O-methyluridine-3'-phosphate
  modified_base 12: mod_base = OTHER; note = 2'-fluoroguanosine-3'-phosphate
  modified_base 13: mod_base = OTHER; note = 2'-O-methylguanosine-3'-phosphate
  modified_base 14: mod_base = OTHER; note = 2'-fluoroadenosine-3'-phosphate
  modified_base 15: mod_base = OTHER; note = 2'-O-methyladenosine-3'-phosphate
  modified_base 16: mod_base = OTHER; note = 2'-fluoroguanosine-3'-phosphate
  modified_base 17: mod_base = OTHER; note = 2'-O-methylguanosine-3'-phosphate
  modified_base 18: mod_base = OTHER; note = 2'-fluorocytidine-3'-phosphate
  modified_base 19: mod_base = OTHER; note = 2'-O-methylguanosine-3'-phosphorothioate
  modified_base 20: mod_base = OTHER; note = 2'-O-methyladenosine-3'-phosphorothioate
  modified_base 21: mod_base = OTHER; note = 2'-O-methyladenosine
attctcatcctggaaggcgaa

SEQ ID NO: 956 - RNA, 21 nt, synthetic construct
  source 1..21: mol_type = other RNA
  modified_base 1: mod_base = OTHER; note = 5'-phosphate-2'-O-methyladenosine-3'-phosphorothioate
  modified_base 2: mod_base = OTHER; note = 2'-fluorouridine-3'-phosphorothioate
  modified_base 3: mod_base = OTHER; note = 2'-O-methylcytidine-3'-phosphate
  modified_base 4: mod_base = OTHER; note = 2'-fluorocytidine-3'-phosphate
  modified_base 5: mod_base = OTHER; note = 2'-O-methyladenosine-3'-phosphate
  modified_base 6: mod_base = OTHER; note = 2'-fluorouridine-3'-phosphate
  modified_base 7: mod_base = OTHER; note = 2'-O-methylguanosine-3'-phosphate
  modified_base 8: mod_base = OTHER; note = 2'-fluoroadenosine-3'-phosphate
  modified_base 9: mod_base = OTHER; note = 2'-O-methylcytidine-3'-phosphate
  modified_base 10: mod_base = OTHER; note = 2'-fluorocytidine-3'-phosphate
  modified_base 11: mod_base = OTHER; note = 2'-O-methyladenosine-3'-phosphate
  modified_base 12: mod_base = OTHER; note = 2'-fluoroguanosine-3'-phosphate
  modified_base 13: mod_base = OTHER; note = 2'-O-methylguanosine-3'-phosphate
  modified_base 14: mod_base = OTHER; note = 2'-fluorouridine-3'-phosphate
  modified_base 15: mod_base = OTHER; note = 2'-O-methyladenosine-3'-phosphate
  modified_base 16: mod_base = OTHER; note = 2'-fluorocytidine-3'-phosphate
  modified_base 17: mod_base = OTHER; note = 2'-O-methyladenosine-3'-phosphate
  modified_base 18: mod_base = OTHER; note = 2'-fluoroguanosine-3'-phosphate
  modified_base 19: mod_base = OTHER; note = 2'-O-methylguanosine-3'-phosphorothioate
  modified_base 20: mod_base = OTHER; note = 2'-O-methyluridine-3'-phosphorothioate
  modified_base 21: mod_base = OTHER; note = 2'-O-methyladenosine
atccatgaccaggtacaggta

SEQ ID NO: 957 - RNA, 21 nt, synthetic construct
  source 1..21: mol_type = other RNA
  modified_base 1: mod_base = OTHER; note = 5'-phosphate-2'-O-methyladenosine-3'-phosphorothioate
  modified_base 2: mod_base = OTHER; note = 2'-fluorocytidine-3'-phosphorothioate
  modified_base 3: mod_base = OTHER; note = 2'-O-methyluridine-3'-phosphate
  modified_base 4: mod_base = OTHER; note = 2'-fluorocytidine-3'-phosphate
  modified_base 5: mod_base = OTHER; note = 2'-O-methylcytidine-3'-phosphate
  modified_base 6: mod_base = OTHER; note = 2'-fluoroadenosine-3'-phosphate
  modified_base 7: mod_base = OTHER; note = 2'-O-methyluridine-3'-phosphate
  modified_base 8: mod_base = OTHER; note = 2'-fluoroguanosine-3'-phosphate
  modified_base 9: mod_base = OTHER; note = 2'-O-methyladenosine-3'-phosphate
  modified_base 10: mod_base = OTHER; note = 2'-fluorocytidine-3'-phosphate
  modified_base 11: mod_base = OTHER; note = 2'-O-methylcytidine-3'-phosphate
  modified_base 12: mod_base = OTHER; note = 2'-fluoroadenosine-3'-phosphate
  modified_base 13: mod_base = OTHER; note = 2'-O-methylguanosine-3'-phosphate
  modified_base 14: mod_base = OTHER; note = 2'-fluoroguanosine-3'-phosphate
  modified_base 15: mod_base = OTHER; note = 2'-O-methyluridine-3'-phosphate
  modified_base 16: mod_base = OTHER; note = 2'-fluoroadenosine-3'-phosphate
  modified_base 17: mod_base = OTHER; note = 2'-O-methylcytidine-3'-phosphate
  modified_base 18: mod_base = OTHER; note = 2'-fluoroadenosine-3'-phosphate
  modified_base 19: mod_base = OTHER; note = 2'-O-methylguanosine-3'-phosphorothioate
  modified_base 20: mod_base = OTHER; note = 2'-O-methylguanosine-3'-phosphorothioate
  modified_base 21: mod_base = OTHER; note = 2'-O-methyluridine
actccatgaccaggtacaggt

SEQ ID NO: 958 - RNA, 21 nt, synthetic construct
  source 1..21: mol_type = other RNA
  modified_base 1: mod_base = OTHER; note = 5'-phosphate-2'-O-methyluridine-3'-phosphorothioate
  modified_base 2: mod_base = OTHER; note = 2'-fluoroadenosine-3'-phosphorothioate
  modified_base 3: mod_base = OTHER; note = 2'-O-methylcytidine-3'-phosphate
  modified_base 4: mod_base = OTHER; note = 2'-fluorouridine-3'-phosphate
  modified_base 5: mod_base = OTHER; note = 2'-O-methylcytidine-3'-phosphate
  modified_base 6: mod_base = OTHER; note = 2'-fluorocytidine-3'-phosphate
  modified_base 7: mod_base = OTHER; note = 2'-O-methyladenosine-3'-phosphate
  modified_base 8: mod_base = OTHER; note = 2'-fluorouridine-3'-phosphate
  modified_base 9: mod_base = OTHER; note = 2'-O-methylguanosine-3'-phosphate
  modified_base 10: mod_base = OTHER; note = 2'-fluoroadenosine-3'-phosphate
  modified_base 11: mod_base = OTHER; note = 2'-O-methylcytidine-3'-phosphate
  modified_base 12: mod_base = OTHER; note = 2'-fluorocytidine-3'-phosphate
  modified_base 13: mod_base = OTHER; note = 2'-O-methyladenosine-3'-phosphate
  modified_base 14: mod_base = OTHER; note = 2'-fluoroguanosine-3'-phosphate
  modified_base 15: mod_base = OTHER; note = 2'-O-methylguanosine-3'-phosphate
  modified_base 16: mod_base = OTHER; note = 2'-fluorouridine-3'-phosphate
  modified_base 17: mod_base = OTHER; note = 2'-O-methyladenosine-3'-phosphate
  modified_base 18: mod_base = OTHER; note = 2'-fluorocytidine-3'-phosphate
  modified_base 19: mod_base = OTHER; note = 2'-O-methyladenosine-3'-phosphorothioate
  modified_base 20: mod_base = OTHER; note = 2'-O-methylguanosine-3'-phosphorothioate
  modified_base 21: mod_base = OTHER; note = 2'-O-methylguanosine
tactccatgaccaggtacagg

SEQ ID NO: 959 - RNA, 21 nt, synthetic construct
  source 1..21: mol_type = other RNA
  modified_base 1: mod_base = OTHER; note = 5'-phosphate-2'-O-methyladenosine-3'-phosphorothioate
  modified_base 2: mod_base = OTHER; note = 2'-fluorouridine-3'-phosphorothioate
  modified_base 3: mod_base = OTHER; note = 2'-O-methyladenosine-3'-phosphate
  modified_base 4: mod_base = OTHER; note = 2'-fluorocytidine-3'-phosphate
  modified_base 5: mod_base = OTHER; note = 2'-O-methyluridine-3'-phosphate
  modified_base 6: mod_base = OTHER; note = 2'-fluorocytidine-3'-phosphate
  modified_base 7: mod_base = OTHER; note = 2'-O-methylcytidine-3'-phosphate
  modified_base 8: mod_base = OTHER; note = 2'-fluoroadenosine-3'-phosphate
  modified_base 9: mod_base = OTHER; note = 2'-O-methyluridine-3'-phosphate
  modified_base 10: mod_base = OTHER; note = 2'-fluoroguanosine-3'-phosphate
  modified_base 11: mod_base = OTHER; note = 2'-O-methyladenosine-3'-phosphate
  modified_base 12: mod_base = OTHER; note = 2'-fluorocytidine-3'-phosphate
  modified_base 13: mod_base = OTHER; note = 2'-O-methylcytidine-3'-phosphate
  modified_base 14: mod_base = OTHER; note = 2'-fluoroadenosine-3'-phosphate
  modified_base 15: mod_base = OTHER; note = 2'-O-methylguanosine-3'-phosphate
  modified_base 16: mod_base = OTHER; note = 2'-fluoroguanosine-3'-phosphate
  modified_base 17: mod_base = OTHER; note = 2'-O-methyluridine-3'-phosphate
  modified_base 18: mod_base = OTHER; note = 2'-fluoroadenosine-3'-phosphate
  modified_base 19: mod_base = OTHER; note = 2'-O-methylcytidine-3'-phosphorothioate
  modified_base 20: mod_base = OTHER; note = 2'-O-methyladenosine-3'-phosphorothioate
  modified_base 21: mod_base = OTHER; note = 2'-O-methylguanosine
atactccatgaccaggtacag

SEQ ID NO: 960 - RNA, 21 nt, synthetic construct
  source 1..21: mol_type = other RNA
  modified_base 1: mod_base = OTHER; note = 5'-phosphate-2'-O-methyladenosine-3'-phosphorothioate
  modified_base 2: mod_base = OTHER; note = 2'-fluorouridine-3'-phosphorothioate
  modified_base 3: mod_base = OTHER; note = 2'-O-methyladenosine-3'-phosphate
  modified_base 4: mod_base = OTHER; note = 2'-fluoroadenosine-3'-phosphate
  modified_base 5: mod_base = OTHER; note = 2'-O-methyluridine-3'-phosphate
  modified_base 6: mod_base = OTHER; note = 2'-fluoroadenosine-3'-phosphate
  modified_base 7: mod_base = OTHER; note = 2'-O-methylcytidine-3'-phosphate
  modified_base 8: mod_base = OTHER; note = 2'-fluorouridine-3'-phosphate
  modified_base 9: mod_base = OTHER; note = 2'-O-methylcytidine-3'-phosphate
  modified_base 10: mod_base = OTHER; note = 2'-fluorocytidine-3'-phosphate
  modified_base 11: mod_base = OTHER; note = 2'-O-methyladenosine-3'-phosphate
  modified_base 12: mod_base = OTHER; note = 2'-fluorouridine-3'-phosphate
  modified_base 13: mod_base = OTHER; note = 2'-O-methylguanosine-3'-phosphate
  modified_base 14: mod_base = OTHER; note = 2'-fluoroadenosine-3'-phosphate
  modified_base 15: mod_base = OTHER; note = 2'-O-methylcytidine-3'-phosphate
  modified_base 16: mod_base = OTHER; note = 2'-fluorocytidine-3'-phosphate
  modified_base 17: mod_base = OTHER; note = 2'-O-methyladenosine-3'-phosphate
  modified_base 18: mod_base = OTHER; note = 2'-fluoroguanosine-3'-phosphate
  modified_base 19: mod_base = OTHER; note = 2'-O-methylguanosine-3'-phosphorothioate
  modified_base 20: mod_base = OTHER; note = 2'-O-methyluridine-3'-phosphorothioate
  modified_base 21: mod_base = OTHER; note = 2'-O-methyladenosine
ataatactccatgaccaggta

SEQ ID NO: 961 - RNA, 21 nt, synthetic construct
  source 1..21: mol_type = other RNA
  modified_base 1: mod_base = OTHER; note = 5'-phosphate-2'-O-methyladenosine-3'-phosphorothioate
  modified_base 2: mod_base = OTHER; note = 2'-fluoroadenosine-3'-phosphorothioate
  modified_base 3: mod_base = OTHER; note = 2'-O-methylcytidine-3'-phosphate
  modified_base 4: mod_base = OTHER; note = 2'-fluoroguanosine-3'-phosphate
  modified_base 5: mod_base = OTHER; note = 2'-O-methyluridine-3'-phosphate
  modified_base 6: mod_base = OTHER; note = 2'-fluoroadenosine-3'-phosphate
  modified_base 7: mod_base = OTHER; note = 2'-O-methyladenosine-3'-phosphate
  modified_base 8: mod_base = OTHER; note = 2'-fluorouridine-3'-phosphate
  modified_base 9: mod_base = OTHER; note = 2'-O-methyladenosine-3'-phosphate
  modified_base 10: mod_base = OTHER; note = 2'-fluorocytidine-3'-phosphate
  modified_base 11: mod_base = OTHER; note = 2'-O-methyluridine-3'-phosphate
  modified_base 12: mod_base = OTHER; note = 2'-fluorocytidine-3'-phosphate
  modified_base 13: mod_base = OTHER; note = 2'-O-methylcytidine-3'-phosphate
  modified_base 14: mod_base = OTHER; note = 2'-fluoroadenosine-3'-phosphate
  modified_base 15: mod_base = OTHER; note = 2'-O-methyluridine-3'-phosphate
  modified_base 16: mod_base = OTHER; note = 2'-fluoroguanosine-3'-phosphate
  modified_base 17: mod_base = OTHER; note = 2'-O-methyladenosine-3'-phosphate
  modified_base 18: mod_base = OTHER; note = 2'-fluorocytidine-3'-phosphate
  modified_base 19: mod_base = OTHER; note = 2'-O-methylcytidine-3'-phosphorothioate
  modified_base 20: mod_base = OTHER; note = 2'-O-methyladenosine-3'-phosphorothioate
  modified_base 21: mod_base = OTHER; note = 2'-O-methylguanosine
aacgtaatactccatgaccag

SEQ ID NO: 962 - RNA, 21 nt, synthetic construct
  source 1..21: mol_type = other RNA
  modified_base 1: mod_base = OTHER; note = 5'-phosphate-2'-O-methyladenosine-3'-phosphorothioate
  modified_base 2: mod_base = OTHER; note = 2'-fluoroadenosine-3'-phosphorothioate
  modified_base 3: mod_base = OTHER; note = 2'-O-methylguanosine-3'-phosphate
  modified_base 4: mod_base = OTHER; note = 2'-fluorocytidine-3'-phosphate
  modified_base 5: mod_base = OTHER; note = 2'-O-methyladenosine-3'-phosphate
  modified_base 6: mod_base = OTHER; note = 2'-fluoroguanosine-3'-phosphate
  modified_base 7: mod_base = OTHER; note = 2'-O-methyluridine-3'-phosphate
  modified_base 8: mod_base = OTHER; note = 2'-fluoroguanosine-3'-phosphate
  modified_base 9: mod_base = OTHER; note = 2'-O-methyluridine-3'-phosphate
  modified_base 10: mod_base = OTHER; note = 2'-fluorocytidine-3'-phosphate
  modified_base 11: mod_base = OTHER; note = 2'-O-methyladenosine-3'-phosphate
  modified_base 12: mod_base = OTHER; note = 2'-fluoroguanosine-3'-phosphate
  modified_base 13: mod_base = OTHER; note = 2'-O-methylcytidine-3'-phosphate
  modified_base 14: mod_base = OTHER; note = 2'-fluoroadenosine-3'-phosphate
  modified_base 15: mod_base = OTHER; note = 2'-O-methylguanosine-3'-phosphate
  modified_base 16: mod_base = OTHER; note = 2'-fluoroguanosine-3'-phosphate
  modified_base 17: mod_base = OTHER; note = 2'-O-methyluridine-3'-phosphate
  modified_base 18: mod_base = OTHER; note = 2'-fluorocytidine-3'-phosphate
  modified_base 19: mod_base = OTHER; note = 2'-O-methylcytidine-3'-phosphorothioate
  modified_base 20: mod_base = OTHER; note = 2'-O-methylcytidine-3'-phosphorothioate
  modified_base 21: mod_base = OTHER; note = 2'-O-methylcytidine
aagcagtgtcagcaggtcccc

SEQ ID NO: 963 - RNA, 21 nt, synthetic construct
  source 1..21: mol_type = other RNA
  modified_base 1: mod_base = OTHER; note = 5'-phosphate-2'-O-methyladenosine-3'-phosphorothioate
  modified_base 2: mod_base = OTHER; note = 2'-fluorouridine-3'-phosphorothioate
  modified_base 3: mod_base = OTHER; note = 2'-O-methylcytidine-3'-phosphate
  modified_base 4: mod_base = OTHER; note = 2'-fluoroadenosine-3'-phosphate
  modified_base 5: mod_base = OTHER; note = 2'-O-methylguanosine-3'-phosphate
  modified_base 6: mod_base = OTHER; note = 2'-fluorocytidine-3'-phosphate
  modified_base 7: mod_base = OTHER; note = 2'-O-methyladenosine-3'-phosphate
  modified_base 8: mod_base = OTHER; note = 2'-fluoroguanosine-3'-phosphate
  modified_base 9: mod_base = OTHER; note = 2'-O-methyluridine-3'-phosphate
  modified_base 10: mod_base = OTHER; note = 2'-fluoroguanosine-3'-phosphate
  modified_base 11: mod_base = OTHER; note = 2'-O-methyluridine-3'-phosphate
  modified_base 12: mod_base = OTHER; note = 2'-fluorocytidine-3'-phosphate
  modified_base 13: mod_base = OTHER; note = 2'-O-methyladenosine-3'-phosphate
  modified_base 14: mod_base = OTHER; note = 2'-fluoroguanosine-3'-phosphate
  modified_base 15: mod_base = OTHER; note = 2'-O-methylcytidine-3'-phosphate
  modified_base 16: mod_base = OTHER; note = 2'-fluoroadenosine-3'-phosphate
  modified_base 17: mod_base = OTHER; note = 2'-O-methylguanosine-3'-phosphate
  modified_base 18: mod_base = OTHER; note = 2'-fluoroguanosine-3'-phosphate
  modified_base 19: mod_base = OTHER; note = 2'-O-methyluridine-3'-phosphorothioate
  modified_base 20: mod_base = OTHER; note = 2'-O-methylcytidine-3'-phosphorothioate
  modified_base 21: mod_base = OTHER; note = 2'-O-methylcytidine
atcagcagtgtcagcaggtcc

SEQ ID NO: 964 - RNA, 21 nt, synthetic construct
  source 1..21: mol_type = other RNA
  modified_base 1: mod_base = OTHER; note = 5'-phosphate-2'-O-methyluridine-3'-phosphorothioate
  modified_base 2: mod_base = OTHER; note = 2'-fluorouridine-3'-phosphorothioate
  modified_base 3: mod_base = OTHER; note = 2'-O-methylguanosine-3'-phosphate
  modified_base 4: mod_base = OTHER; note = 2'-fluorocytidine-3'-phosphate
  modified_base 5: mod_base = OTHER; note = 2'-O-methyluridine-3'-phosphate
  modified_base 6: mod_base = OTHER; note = 2'-fluorocytidine-3'-phosphate
  modified_base 7: mod_base = OTHER; note = 2'-O-methyladenosine-3'-phosphate
  modified_base 8: mod_base = OTHER; note = 2'-fluoroguanosine-3'-phosphate
  modified_base 9: mod_base = OTHER; note = 2'-O-methylcytidine-3'-phosphate
  modified_base 10: mod_base = OTHER; note = 2'-fluoroadenosine-3'-phosphate
  modified_base 11: mod_base = OTHER; note = 2'-O-methylguanosine-3'-phosphate
  modified_base 12: mod_base = OTHER; note = 2'-fluorouridine-3'-phosphate
  modified_base 13: mod_base = OTHER; note = 2'-O-methylguanosine-3'-phosphate
  modified_base 14: mod_base = OTHER; note = 2'-fluorouridine-3'-phosphate
  modified_base 15: mod_base = OTHER; note = 2'-O-methylcytidine-3'-phosphate
  modified_base 16: mod_base = OTHER; note = 2'-fluoroadenosine-3'-phosphate
  modified_base 17: mod_base = OTHER; note = 2'-O-methylguanosine-3'-phosphate
  modified_base 18: mod_base = OTHER; note = 2'-fluorocytidine-3'-phosphate
  modified_base 19: mod_base = OTHER; note = 2'-O-methyladenosine-3'-phosphorothioate
  modified_base 20: mod_base = OTHER; note = 2'-O-methylguanosine-3'-phosphorothioate
  modified_base 21: mod_base = OTHER; note = 2'-O-methylguanosine
ttgctcagcagtgtcagcagg

SEQ ID NO: 965 - RNA, 21 nt, synthetic construct
  source 1..21: mol_type = other RNA
  modified_base 1: mod_base = OTHER; note = 5'-phosphate-2'-O-methyladenosine-3'-phosphorothioate
  modified_base 2: mod_base = OTHER; note = 2'-fluorouridine-3'-phosphorothioate
  modified_base 3: mod_base = OTHER; note = 2'-O-methyluridine-3'-phosphate
  modified_base 4: mod_base = OTHER; note = 2'-fluoroguanosine-3'-phosphate
  modified_base 5: mod_base = OTHER; note = 2'-O-methylcytidine-3'-phosphate
  modified_base 6: mod_base = OTHER; note = 2'-fluorouridine-3'-phosphate
  modified_base 7: mod_base = OTHER; note = 2'-O-methylcytidine-3'-phosphate
  modified_base 8: mod_base = OTHER; note = 2'-fluoroadenosine-3'-phosphate
  modified_base 9: mod_base = OTHER; note = 2'-O-methylguanosine-3'-phosphate
  modified_base 10: mod_base = OTHER; note = 2'-fluorocytidine-3'-phosphate
  modified_base 11: mod_base = OTHER; note = 2'-O-methyladenosine-3'-phosphate
  modified_base 12: mod_base = OTHER; note = 2'-fluoroguanosine-3'-phosphate
  modified_base 13: mod_base = OTHER; note = 2'-O-methyluridine-3'-phosphate
  modified_base 14: mod_base = OTHER; note = 2'-fluoroguanosine-3'-phosphate
  modified_base 15: mod_base = OTHER; note = 2'-O-methyluridine-3'-phosphate
  modified_base 16: mod_base = OTHER; note = 2'-fluorocytidine-3'-phosphate
  modified_base 17: mod_base = OTHER; note = 2'-O-methyladenosine-3'-phosphate
  modified_base 18: mod_base = OTHER; note = 2'-fluoroguanosine-3'-phosphate
  modified_base 19: mod_base = OTHER; note = 2'-O-methylcytidine-3'-phosphorothioate
  modified_base 20: mod_base = OTHER; note = 2'-O-methyladenosine-3'-phosphorothioate
  modified_base 21: mod_base = OTHER; note = 2'-O-methylguanosine
attgctcagcagtgtcagcag

SEQ ID NO: 966 - RNA, 21 nt, synthetic construct
  source 1..21: mol_type = other RNA
  modified_base 1: mod_base = OTHER; note = 5'-phosphate-2'-O-methyladenosine-3'-phosphorothioate
  modified_base 2: mod_base = OTHER; note = 2'-fluorocytidine-3'-phosphorothioate
  modified_base 3: mod_base = OTHER; note = 2'-O-methyluridine-3'-phosphate
  modified_base 4: mod_base = OTHER; note = 2'-fluorouridine-3'-phosphate
  modified_base 5: mod_base = OTHER; note = 2'-O-methylguanosine-3'-phosphate
  modified_base 6: mod_base = OTHER; note = 2'-fluorocytidine-3'-phosphate
  modified_base 7: mod_base = OTHER; note = 2'-O-methyluridine-3'-phosphate
  modified_base 8: mod_base = OTHER; note = 2'-fluorocytidine-3'-phosphate
  modified_base 9: mod_base = OTHER; note = 2'-O-methyladenosine-3'-phosphate
  modified_base 10: mod_base = OTHER; note = 2'-fluoroguanosine-3'-phosphate
  modified_base 11: mod_base = OTHER; note = 2'-O-methylcytidine-3'-phosphate
  modified_base 12: mod_base = OTHER; note = 2'-fluoroadenosine-3'-phosphate
  modified_base 13: mod_base = OTHER; note = 2'-O-methylguanosine-3'-phosphate
  modified_base 14: mod_base = OTHER; note = 2'-fluorouridine-3'-phosphate
  modified_base 15: mod_base = OTHER; note = 2'-O-methylguanosine-3'-phosphate
  modified_base 16: mod_base = OTHER; note = 2'-fluorouridine-3'-phosphate
  modified_base 17: mod_base = OTHER; note = 2'-O-methylcytidine-3'-phosphate
  modified_base 18: mod_base = OTHER; note = 2'-fluoroadenosine-3'-phosphate
  modified_base 19: mod_base = OTHER; note = 2'-O-methylguanosine-3'-phosphorothioate
  modified_base 20: mod_base = OTHER; note = 2'-O-methylcytidine-3'-phosphorothioate
  modified_base 21: mod_base = OTHER; note = 2'-O-methyladenosine
acttgctcagcagtgtcagca

SEQ ID NO: 967 - RNA, 21 nt, synthetic construct
  source 1..21: mol_type = other RNA
  modified_base 1: mod_base = OTHER; note = 5'-phosphate-2'-O-methyladenosine-3'-phosphorothioate
  modified_base 2: mod_base = OTHER; note = 2'-fluoroadenosine-3'-phosphorothioate
  modified_base 3: mod_base = OTHER; note = 2'-O-methylcytidine-3'-phosphate
  modified_base 4: mod_base = OTHER; note = 2'-fluorouridine-3'-phosphate
  modified_base 5: mod_base = OTHER; note = 2'-O-methyluridine-3'-phosphate
  modified_base 6: mod_base = OTHER; note = 2'-fluoroguanosine-3'-phosphate
  modified_base 7: mod_base = OTHER; note = 2'-O-methylcytidine-3'-phosphate
  modified_base 8: mod_base = OTHER; note = 2'-fluorouridine-3'-phosphate
  modified_base 9: mod_base = OTHER; note = 2'-O-methylcytidine-3'-phosphate
  modified_base 10: mod_base = OTHER; note = 2'-fluoroadenosine-3'-phosphate
  modified_base 11: mod_base = OTHER; note = 2'-O-methylguanosine-3'-phosphate
  modified_base 12: mod_base = OTHER; note = 2'-fluorocytidine-3'-phosphate
  modified_base 13: mod_base = OTHER; note = 2'-O-methyladenosine-3'-phosphate
  modified_base 14: mod_base = OTHER; note = 2'-fluoroguanosine-3'-phosphate
  modified_base 15: mod_base = OTHER; note = 2'-O-methyluridine-3'-phosphate
  modified_base 16: mod_base = OTHER; note = 2'-fluoroguanosine-3'-phosphate
  modified_base 17: mod_base = OTHER; note = 2'-O-methyluridine-3'-phosphate
  modified_base 18: mod_base = OTHER; note = 2'-fluorocytidine-3'-phosphate
  modified_base 19: mod_base = OTHER; note = 2'-O-methyladenosine-3'-phosphorothioate
  modified_base 20: mod_base = OTHER; note = 2'-O-methylguanosine-3'-phosphorothioate
  modified_base 21: mod_base = OTHER; note = 2'-O-methylcytidine
aacttgctcagcagtgtcagc

SEQ ID NO: 968 - RNA, 21 nt, synthetic construct
  source 1..21: mol_type = other RNA
  modified_base 1: mod_base = OTHER; note = 5'-phosphate-2'-O-methyluridine-3'-phosphorothioate
  modified_base 2: mod_base = OTHER; note = 2'-fluoroadenosine-3'-phosphorothioate
  modified_base 3: mod_base = OTHER; note = 2'-O-methyladenosine-3'-phosphate
  modified_base 4: mod_base = OTHER; note = 2'-fluoroadenosine-3'-phosphate
  modified_base 5: mod_base = OTHER; note = 2'-O-methylcytidine-3'-phosphate
  modified_base 6: mod_base = OTHER; note = 2'-fluorouridine-3'-phosphate
  modified_base 7: mod_base = OTHER; note = 2'-O-methyluridine-3'-phosphate
  modified_base 8: mod_base = OTHER; note = 2'-fluoroguanosine-3'-phosphate
  modified_base 9: mod_base = OTHER; note = 2'-O-methylcytidine-3'-phosphate
  modified_base 10: mod_base = OTHER; note = 2'-fluorouridine-3'-phosphate
  modified_base 11: mod_base = OTHER; note = 2'-O-methylcytidine-3'-phosphate
  modified_base 12: mod_base = OTHER; note = 2'-fluoroadenosine-3'-phosphate
  modified_base 13: mod_base = OTHER; note = 2'-O-methylguanosine-3'-phosphate
  modified_base 14: mod_base = OTHER; note = 2'-fluorocytidine-3'-phosphate
  modified_base 15: mod_base = OTHER; note = 2'-O-methyladenosine-3'-phosphate
  modified_base 16: mod_base = OTHER; note = 2'-fluoroguanosine-3'-phosphate
  modified_base 17: mod_base = OTHER; note = 2'-O-methyluridine-3'-phosphate
  modified_base 18: mod_base = OTHER; note = 2'-fluoroguanosine-3'-phosphate
  modified_base 19: mod_base = OTHER; note = 2'-O-methyluridine-3'-phosphorothioate
  modified_base 20: mod_base = OTHER; note = 2'-O-methylcytidine-3'-phosphorothioate
  modified_base 21: mod_base = OTHER; note = 2'-O-methyladenosine
taaacttgctcagcagtgtca

SEQ ID NO: 969 - RNA, 21 nt, synthetic construct
  source 1..21: mol_type = other RNA
  modified_base 1: mod_base = OTHER; note = 5'-phosphate-2'-O-methyluridine-3'-phosphorothioate
  modified_base 2: mod_base = OTHER; note = 2'-fluorocytidine-3'-phosphorothioate
  modified_base 3: mod_base = OTHER; note = 2'-O-methyluridine-3'-phosphate
  modified_base 4: mod_base = OTHER; note = 2'-fluorocytidine-3'-phosphate
  modified_base 5: mod_base = OTHER; note = 2'-O-methylguanosine-3'-phosphate
  modified_base 6: mod_base = OTHER; note = 2'-fluoroguanosine-3'-phosphate
  modified_base 7: mod_base = OTHER; note = 2'-O-methylcytidine-3'-phosphate
  modified_base 8: mod_base = OTHER; note = 2'-fluorocytidine-3'-phosphate
  modified_base 9: mod_base = OTHER; note = 2'-O-methylguanosine-3'-phosphate
  modified_base 10: mod_base = OTHER; note = 2'-fluoroguanosine-3'-phosphate
  modified_base 11: mod_base = OTHER; note = 2'-O-methyladenosine-3'-phosphate
  modified_base 12: mod_base = OTHER; note = 2'-fluoroadenosine-3'-phosphate
  modified_base 13: mod_base = OTHER; note = 2'-O-methyluridine-3'-phosphate
  modified_base 14: mod_base = OTHER; note = 2'-fluorocytidine-3'-phosphate
  modified_base 15: mod_base = OTHER; note = 2'-O-methylcytidine-3'-phosphate
  modified_base 16: mod_base = OTHER; note = 2'-fluoroguanosine-3'-phosphate
  modified_base 17: mod_base = OTHER; note = 2'-O-methylcytidine-3'-phosphate
  modified_base 18: mod_base = OTHER; note = 2'-fluorouridine-3'-phosphate
  modified_base 19: mod_base = OTHER; note = 2'-O-methylcytidine-3'-phosphorothioate
  modified_base 20: mod_base = OTHER; note = 2'-O-methylcytidine-3'-phosphorothioate
  modified_base 21: mod_base = OTHER; note = 2'-O-methylcytidine
tctcggccggaatccgctccc

SEQ ID NO: 970 - RNA, 21 nt, synthetic construct
  source 1..21: mol_type = other RNA
  modified_base 1: mod_base = OTHER; note = 5'-phosphate-2'-O-methyladenosine-3'-phosphorothioate
  modified_base 2: mod_base = OTHER; note = 2'-fluorouridine-3'-phosphorothioate
  modified_base 3: mod_base = OTHER; note = 2'-O-methylcytidine-3'-phosphate
  modified_base 4: mod_base = OTHER; note = 2'-fluorouridine-3'-phosphate
  modified_base 5: mod_base = OTHER; note = 2'-O-methylcytidine-3'-phosphate
  modified_base 6: mod_base = OTHER; note = 2'-fluoroguanosine-3'-phosphate
  modified_base 7: mod_base = OTHER; note = 2'-O-methylguanosine-3'-phosphate
  modified_base 8: mod_base = OTHER; note = 2'-fluorocytidine-3'-phosphate
  modified_base 9: mod_base = OTHER; note = 2'-O-methylcytidine-3'-phosphate
  modified_base 10: mod_base = OTHER; note = 2'-fluoroguanosine-3'-phosphate
  modified_base 11: mod_base = OTHER; note = 2'-O-methylguanosine-3'-phosphate
  modified_base 12: mod_base = OTHER; note = 2'-fluoroadenosine-3'-phosphate
  modified_base 13: mod_base = OTHER; note = 2'-O-methyladenosine-3'-phosphate
  modified_base 14: mod_base = OTHER; note = 2'-fluorouridine-3'-phosphate
  modified_base 15: mod_base = OTHER; note = 2'-O-methylcytidine-3'-phosphate
  modified_base 16: mod_base = OTHER; note = 2'-fluorocytidine-3'-phosphate
  modified_base 17: mod_base = OTHER; note = 2'-O-methylguanosine-3'-phosphate
  modified_base 18: mod_base = OTHER; note = 2'-fluorocytidine-3'-phosphate
  modified_base 19: mod_base = OTHER; note = 2'-O-methyluridine-3'-phosphorothioate
  modified_base 20: mod_base = OTHER; note = 2'-O-methylcytidine-3'-phosphorothioate
  modified_base 21: mod_base = OTHER; note = 2'-O-methylcytidine
atctcggccggaatccgctcc

SEQ ID NO: 971 - RNA, 21 nt, synthetic construct
  source 1..21: mol_type = other RNA
  modified_base 1: mod_base = OTHER; note = 5'-phosphate-2'-O-methyladenosine-3'-phosphorothioate
  modified_base 2: mod_base = OTHER; note = 2'-fluoroadenosine-3'-phosphorothioate
  modified_base 3: mod_base = OTHER; note = 2'-O-methylguanosine-3'-phosphate
  modified_base 4: mod_base = OTHER; note = 2'-fluorocytidine-3'-phosphate
  modified_base 5: mod_base = OTHER; note = 2'-O-methylguanosine-3'-phosphate
  modified_base 6: mod_base = OTHER; note = 2'-fluorocytidine-3'-phosphate
  modified_base 7: mod_base = OTHER; note = 2'-O-methylguanosine-3'-phosphate
  modified_base 8: mod_base = OTHER; note = 2'-fluorocytidine-3'-phosphate
  modified_base 9: mod_base = OTHER; note = 2'-O-methylcytidine-3'-phosphate
  modified_base 10: mod_base = OTHER; note = 2'-fluoroadenosine-3'-phosphate
  modified_base 11: mod_base = OTHER; note = 2'-O-methyluridine-3'-phosphate
  modified_base 12: mod_base = OTHER; note = 2'-fluorocytidine-3'-phosphate
  modified_base 13: mod_base = OTHER; note = 2'-O-methyluridine-3'-phosphate
  modified_base 14: mod_base = OTHER; note = 2'-fluorocytidine-3'-phosphate
  modified_base 15: mod_base = OTHER; note = 2'-O-methylguanosine-3'-phosphate
  modified_base 16: mod_base = OTHER; note = 2'-fluoroguanosine-3'-phosphate
  modified_base 17: mod_base = OTHER; note = 2'-O-methylcytidine-3'-phosphate
  modified_base 18: mod_base = OTHER; note = 2'-fluorocytidine-3'-phosphate
  modified_base 19: mod_base = OTHER; note = 2'-O-methylguanosine-3'-phosphorothioate
  modified_base 20: mod_base = OTHER; note = 2'-O-methylguanosine-3'-phosphorothioate
  modified_base 21: mod_base = OTHER; note = 2'-O-methyladenosine
aagcgcgccatctcggccgga

SEQ ID NO: 972 - RNA, 21 nt, synthetic construct
  source 1..21: mol_type = other RNA
  modified_base 1: mod_base = OTHER; note = 5'-phosphate-2'-O-methyluridine-3'-phosphorothioate
  modified_base 2: mod_base = OTHER; note = 2'-fluoroadenosine-3'-phosphorothioate
  modified_base 3: mod_base = OTHER; note = 2'-O-methyladenosine-3'-phosphate
  modified_base 4: mod_base = OTHER; note = 2'-fluoroguanosine-3'-phosphate
  modified_base 5: mod_base = OTHER; note = 2'-O-methylcytidine-3'-phosphate
  modified_base 6: mod_base = OTHER; note = 2'-fluoroguanosine-3'-phosphate
  modified_base 7: mod_base = OTHER; note = 2'-O-methylcytidine-3'-phosphate
  modified_base 8: mod_base = OTHER; note = 2'-fluoroguanosine-3'-phosphate
  modified_base 9: mod_base = OTHER; note = 2'-O-methylcytidine-3'-phosphate
  modified_base 10: mod_base = OTHER; note = 2'-fluorocytidine-3'-phosphate
  modified_base 11: mod_base = OTHER; note = 2'-O-methyladenosine-3'-phosphate
  modified_base 12: mod_base = OTHER; note = 2'-fluorouridine-3'-phosphate
  modified_base 13: mod_base = OTHER; note = 2'-O-methylcytidine-3'-phosphate
  modified_base 14: mod_base = OTHER; note = 2'-fluorouridine-3'-phosphate
  modified_base 15: mod_base = OTHER; note = 2'-O-methylcytidine-3'-phosphate
  modified_base 16: mod_base = OTHER; note = 2'-fluoroguanosine-3'-phosphate
  modified_base 17: mod_base = OTHER; note = 2'-O-methylguanosine-3'-phosphate
  modified_base 18: mod_base = OTHER; note = 2'-fluorocytidine-3'-phosphate
  modified_base 19: mod_base = OTHER; note = 2'-O-methylcytidine-3'-phosphorothioate
  modified_base 20: mod_base = OTHER; note = 2'-O-methylguanosine-3'-phosphorothioate
  modified_base 21: mod_base = OTHER; note = 2'-O-methylguanosine
taagcgcgccatctcggccgg

SEQ ID NO: 973 - RNA, 21 nt, synthetic construct
  source 1..21: mol_type = other RNA
  modified_base 1: mod_base = OTHER; note = 5'-phosphate-2'-O-methyladenosine-3'-phosphorothioate
  modified_base 2: mod_base = OTHER; note = 2'-fluoroguanosine-3'-phosphorothioate
  modified_base 3: mod_base = OTHER; note = 2'-O-methyladenosine-3'-phosphate
  modified_base 4: mod_base = OTHER; note = 2'-fluoroadenosine-3'-phosphate
  modified_base 5: mod_base = OTHER; note = 2'-O-methylguanosine-3'-phosphate
  modified_base 6: mod_base = OTHER; note = 2'-fluorocytidine-3'-phosphate
  modified_base 7: mod_base = OTHER; note = 2'-O-methylguanosine-3'-phosphate
  modified_base 8: mod_base = OTHER; note = 2'-fluorocytidine-3'-phosphate
  modified_base 9: mod_base = OTHER; note = 2'-O-methylguanosine-3'-phosphate
  modified_base 10: mod_base = OTHER; note = 2'-fluorocytidine-3'-phosphate
  modified_base 11: mod_base = OTHER; note = 2'-O-methylcytidine-3'-phosphate
  modified_base 12: mod_base = OTHER; note = 2'-fluoroadenosine-3'-phosphate
  modified_base 13: mod_base = OTHER; note = 2'-O-methyluridine-3'-phosphate
  modified_base 14: mod_base = OTHER; note = 2'-fluorocytidine-3'-phosphate
  modified_base 15: mod_base = OTHER; note = 2'-O-methyluridine-3'-phosphate
  modified_base 16: mod_base = OTHER; note = 2'-fluorocytidine-3'-phosphate
  modified_base 17: mod_base = OTHER; note = 2'-O-methylguanosine-3'-phosphate
  modified_base 18: mod_base = OTHER; note = 2'-fluoroguanosine-3'-phosphate
  modified_base 19: mod_base = OTHER; note = 2'-O-methylcytidine-3'-phosphorothioate
  modified_base 20: mod_base = OTHER; note = 2'-O-methylcytidine-3'-phosphorothioate
  modified_base 21: mod_base = OTHER; note = 2'-O-methylguanosine
agaagcgcgccatctcggccg

SEQ ID NO: 974 - RNA, 21 nt, synthetic construct
  source 1..21: mol_type = other RNA
  modified_base 1: mod_base = OTHER; note = 5'-phosphate-2'-O-methyluridine-3'-phosphorothioate
  modified_base 2: mod_base = OTHER; note = 2'-fluoroadenosine-3'-phosphorothioate
  modified_base 3: mod_base = OTHER; note = 2'-O-methylguanosine-3'-phosphate
  modified_base 4: mod_base = OTHER; note = 2'-fluoroadenosine-3'-phosphate
  modified_base 5: mod_base = OTHER; note = 2'-O-methyladenosine-3'-phosphate
  modified_base 6: mod_base = OTHER; note = 2'-fluoroguanosine-3'-phosphate
  modified_base 7: mod_base = OTHER; note = 2'-O-methylcytidine-3'-phosphate
  modified_base 8: mod_base = OTHER; note = 2'-fluoroguanosine-3'-phosphate
  modified_base 9: mod_base = OTHER; note = 2'-O-methylcytidine-3'-phosphate
  modified_base 10: mod_base = OTHER; note = 2'-fluoroguanosine-3'-phosphate
  modified_base 11: mod_base = OTHER; note = 2'-O-methylcytidine-3'-phosphate
  modified_base 12: mod_base = OTHER; note = 2'-fluorocytidine-3'-phosphate
  modified_base 13: mod_base = OTHER; note = 2'-O-methyladenosine-3'-phosphate
  modified_base 14: mod_base = OTHER; note = 2'-fluorouridine-3'-phosphate
  modified_base 15: mod_base = OTHER; note = 2'-O-methylcytidine-3'-phosphate
  modified_base 16: mod_base = OTHER; note = 2'-fluorouridine-3'-phosphate
  modified_base 17: mod_base = OTHER; note = 2'-O-methylcytidine-3'-phosphate
  modified_base 18: mod_base = OTHER; note = 2'-fluoroguanosine-3'-phosphate
  modified_base 19: mod_base = OTHER; note = 2'-O-methylguanosine-3'-phosphorothioate
  modified_base 20: mod_base = OTHER; note = 2'-O-methylcytidine-3'-phosphorothioate
  modified_base 21: mod_base = OTHER; note = 2'-O-methylcytidine
tagaagcgcgccatctcggcc

SEQ ID NO: 975 - RNA, 21 nt, synthetic construct
  source 1..21: mol_type = other RNA
  modified_base 1: mod_base = OTHER; note = 5'-phosphate-2'-O-methyladenosine-3'-phosphorothioate
  modified_base 2: mod_base = OTHER; note = 2'-fluorouridine-3'-phosphorothioate
  modified_base 3: mod_base = OTHER; note = 2'-O-methyladenosine-3'-phosphate
  modified_base 4: mod_base = OTHER; note = 2'-fluoroguanosine-3'-phosphate
  modified_base 5: mod_base = OTHER; note = 2'-O-methyladenosine-3'-phosphate
  modified_base 6: mod_base = OTHER; note = 2'-fluoroadenosine-3'-phosphate
  modified_base 7: mod_base = OTHER; note = 2'-O-methylguanosine-3'-phosphate
  modified_base 8: mod_base = OTHER; note = 2'-fluorocytidine-3'-phosphate
  modified_base 9: mod_base = OTHER; note = 2'-O-methylguanosine-3'-phosphate
  modified_base 10: mod_base = OTHER; note = 2'-fluorocytidine-3'-phosphate
  modified_base 11: mod_base = OTHER; note = 2'-O-methylguanosine-3'-phosphate
  modified_base 12: mod_base = OTHER; note = 2'-fluorocytidine-3'-phosphate
  modified_base 13: mod_base = OTHER; note = 2'-O-methylcytidine-3'-phosphate
  modified_base 14: mod_base = OTHER; note = 2'-fluoroadenosine-3'-phosphate
  modified_base 15: mod_base = OTHER; note = 2'-O-methyluridine-3'-phosphate
  modified_base 16: mod_base = OTHER; note = 2'-fluorocytidine-3'-phosphate
  modified_base 17: mod_base = OTHER; note = 2'-O-methyluridine-3'-phosphate
  modified_base 18: mod_base = OTHER; note = 2'-fluorocytidine-3'-phosphate
  modified_base 19: mod_base = OTHER; note = 2'-O-methylguanosine-3'-phosphorothioate
  modified_base 20: mod_base = OTHER; note = 2'-O-methylguanosine-3'-phosphorothioate
  modified_base 21: mod_base = OTHER; note = 2'-O-methylcytidine
atagaagcgcgccatctcggc

SEQ ID NO: 976 - RNA, 21 nt, synthetic construct
  source 1..21: mol_type = other RNA
  modified_base 1: mod_base = OTHER; note = 5'-phosphate-2'-O-methyladenosine-3'-phosphorothioate
  modified_base 2: mod_base = OTHER; note = 2'-fluorouridine-3'-phosphorothioate
  modified_base 3: mod_base = OTHER; note = 2'-O-methylcytidine-3'-phosphate
  modified_base 4: mod_base = OTHER; note = 2'-fluorouridine-3'-phosphate
  modified_base 5: mod_base = OTHER; note = 2'-O-methylcytidine-3'-phosphate
  modified_base 6: mod_base = OTHER; note = 2'-fluorocytidine-3'-phosphate
  modified_base 7: mod_base = OTHER; note = 2'-O-methylguanosine-3'-phosphate
  modified_base 8: mod_base = OTHER; note = 2'-fluorocytidine-3'-phosphate
  modified_base 9: mod_base = OTHER; note = 2'-O-methylcytidine-3'-phosphate
  modified_base 10: mod_base = OTHER; note = 2'-fluoroadenosine-3'-phosphate
  modified_base 11: mod_base = OTHER; note = 2'-O-methylguanosine-3'-phosphate
  modified_base 12: mod_base = OTHER; note = 2'-fluoroguanosine-3'-phosphate
  modified_base 13: mod_base = OTHER; note = 2'-O-methyluridine-3'-phosphate
  modified_base 14: mod_base = OTHER; note = 2'-fluoroadenosine-3'-phosphate
  modified_base 15: mod_base = OTHER; note = 2'-O-methylguanosine-3'-phosphate
  modified_base 16: mod_base = OTHER; note = 2'-fluoroadenosine-3'-phosphate
  modified_base 17: mod_base = OTHER; note = 2'-O-methyladenosine-3'-phosphate
  modified_base 18: mod_base = OTHER; note = 2'-fluoroguanosine-3'-phosphate
  modified_base 19: mod_base = OTHER; note = 2'-O-methylcytidine-3'-phosphorothioate
  modified_base 20: mod_base = OTHER; note = 2'-O-methylguanosine-3'-phosphorothioate
  modified_base 21: mod_base = OTHER; note = 2'-O-methylcytidine
atctccgccaggtagaagcgc

SEQ ID NO: 977 - RNA, 21 nt, synthetic construct
  source 1..21: mol_type = other RNA
  modified_base 1: mod_base = OTHER; note = 5'-phosphate-2'-O-methyladenosine-3'-phosphorothioate
  modified_base 2: mod_base = OTHER; note = 2'-fluoroadenosine-3'-phosphorothioate
  modified_base 3: mod_base = OTHER; note = 2'-O-methyluridine-3'-phosphate
  modified_base 4: mod_base = OTHER; note = 2'-fluorocytidine-3'-phosphate
  modified_base 5: mod_base = OTHER; note = 2'-O-methyluridine-3'-phosphate
  modified_base 6: mod_base = OTHER; note = 2'-fluorocytidine-3'-phosphate
  modified_base 7: mod_base = OTHER; note = 2'-O-methylcytidine-3'-phosphate
  modified_base 8: mod_base = OTHER; note = 2'-fluoroguanosine-3'-phosphate
  modified_base 9: mod_base = OTHER; note = 2'-O-methylcytidine-3'-phosphate
  modified_base 10: mod_base = OTHER; note = 2'-fluorocytidine-3'-phosphate
  modified_base 11: mod_base = OTHER; note = 2'-O-methyladenosine-3'-phosphate
  modified_base 12: mod_base = OTHER; note = 2'-fluoroguanosine-3'-phosphate
  modified_base 13: mod_base = OTHER; note = 2'-O-methylguanosine-3'-phosphate
  modified_base 14: mod_base = OTHER; note = 2'-fluorouridine-3'-phosphate
  modified_base 15: mod_base = OTHER; note = 2'-O-methyladenosine-3'-phosphate
  modified_base 16: mod_base = OTHER; note = 2'-fluoroguanosine-3'-phosphate
  modified_base 17: mod_base = OTHER; note = 2'-O-methyladenosine-3'-phosphate
  modified_base 18: mod_base = OTHER; note = 2'-fluoroadenosine-3'-phosphate
  modified_base 19: mod_base = OTHER; note = 2'-O-methylguanosine-3'-phosphorothioate
  modified_base 20: mod_base = OTHER; note = 2'-O-methylcytidine-3'-phosphorothioate
  modified_base 21: mod_base = OTHER; note = 2'-O-methylguanosine
aatctccgccaggtagaagcg

SEQ ID NO: 978 - RNA, 21 nt, synthetic construct
  source 1..21: mol_type = other RNA
  modified_base 1: mod_base = OTHER; note = 5'-phosphate-2'-O-methyluridine-3'-phosphorothioate
  modified_base 2: mod_base = OTHER; note = 2'-fluoroadenosine-3'-phosphorothioate
  modified_base 3: mod_base = OTHER; note = 2'-O-methyladenosine-3'-phosphate
  modified_base 4: mod_base = OTHER; note = 2'-fluorouridine-3'-phosphate
  modified_base 5: mod_base = OTHER; note = 2'-O-methylcytidine-3'-phosphate
  modified_base 6: mod_base = OTHER; note = 2'-fluorouridine-3'-phosphate
  modified_base 7: mod_base = OTHER; note = 2'-O-methylcytidine-3'-phosphate
  modified_base 8: mod_base = OTHER; note = 2'-fluorocytidine-3'-phosphate
  modified_base 9: mod_base = OTHER; note = 2'-O-methylguanosine-3'-phosphate
  modified_base 10: mod_base = OTHER; note = 2'-fluorocytidine-3'-phosphate
  modified_base 11: mod_base = OTHER; note = 2'-O-methylcytidine-3'-phosphate
  modified_base 12: mod_base = OTHER; note = 2'-fluoroadenosine-3'-phosphate
  modified_base 13: mod_base = OTHER; note = 2'-O-methylguanosine-3'-phosphate
  modified_base 14: mod_base = OTHER; note = 2'-fluoroguanosine-3'-phosphate
  modified_base 15: mod_base = OTHER; note = 2'-O-methyluridine-3'-phosphate
  modified_base 16: mod_base = OTHER; note = 2'-fluoroadenosine-3'-phosphate
  modified_base 17: mod_base = OTHER; note = 2'-O-methylguanosine-3'-phosphate
  modified_base 18: mod_base = OTHER; note = 2'-fluoroadenosine-3'-phosphate
  modified_base 19: mod_base = OTHER; note = 2'-O-methyladenosine-3'-phosphorothioate
  modified_base 20: mod_base = OTHER; note = 2'-O-methylguanosine-3'-phosphorothioate
  modified_base 21: mod_base = OTHER; note = 2'-O-methylcytidine
taatctccgccaggtagaagc

SEQ ID NO: 979 - RNA, 21 nt, synthetic construct
  source 1..21: mol_type = other RNA
  modified_base 1: mod_base = OTHER; note = 5'-phosphate-2'-O-methyladenosine-3'-phosphorothioate
  modified_base 2: mod_base = OTHER; note = 2'-fluorocytidine-3'-phosphorothioate
  modified_base 3: mod_base = OTHER; note = 2'-O-methyladenosine-3'-phosphate
  modified_base 4: mod_base = OTHER; note = 2'-fluoroadenosine-3'-phosphate
  modified_base 5: mod_base = OTHER; note = 2'-O-methyluridine-3'-phosphate
  modified_base 6: mod_base = OTHER; note = 2'-fluorocytidine-3'-phosphate
  modified_base 7: mod_base = OTHER; note = 2'-O-methyluridine-3'-phosphate
  modified_base 8: mod_base = OTHER; note = 2'-fluorocytidine-3'-phosphate
  modified_base 9: mod_base = OTHER; note = 2'-O-methylcytidine-3'-phosphate
  modified_base 10: mod_base = OTHER; note = 2'-fluoroguanosine-3'-phosphate
  modified_base 11: mod_base = OTHER; note = 2'-O-methylcytidine-3'-phosphate
  modified_base 12: mod_base = OTHER; note = 2'-fluorocytidine-3'-phosphate
  modified_base 13: mod_base = OTHER; note = 2'-O-methyladenosine-3'-phosphate
  modified_base 14: mod_base = OTHER; note = 2'-fluoroguanosine-3'-phosphate
  modified_base 15: mod_base = OTHER; note = 2'-O-methylguanosine-3'-phosphate
  modified_base 16: mod_base = OTHER; note = 2'-fluorouridine-3'-phosphate
  modified_base 17: mod_base = OTHER; note = 2'-O-methyladenosine-3'-phosphate
  modified_base 18: mod_base = OTHER; note = 2'-fluoroguanosine-3'-phosphate
  modified_base 19: mod_base = OTHER; note = 2'-O-methyladenosine-3'-phosphorothioate
  modified_base 20: mod_base = OTHER; note = 2'-O-methyladenosine-3'-phosphorothioate
  modified_base 21: mod_base = OTHER; note = 2'-O-methylguanosine
acaatctccgccaggtagaag

SEQ ID NO: 980 - RNA, 21 nt, synthetic construct
  source 1..21: mol_type = other RNA
  modified_base 1: mod_base = OTHER; note = 5'-phosphate-2'-O-methyladenosine-3'-phosphorothioate
  modified_base 2: mod_base = OTHER; note = 2'-fluoroadenosine-3'-phosphorothioate
  modified_base 3: mod_base = OTHER; note = 2'-O-methylcytidine-3'-phosphate
  modified_base 4: mod_base = OTHER; note = 2'-fluoroadenosine-3'-phosphate
  modified_base 5: mod_base = OTHER; note = 2'-O-methyladenosine-3'-phosphate
  modified_base 6: mod_base = OTHER; note = 2'-fluorouridine-3'-phosphate
  modified_base 7: mod_base = OTHER; note = 2'-O-methylcytidine-3'-phosphate
  modified_base 8: mod_base = OTHER; note = 2'-fluorouridine-3'-phosphate
  modified_base 9: mod_base = OTHER; note = 2'-O-methylcytidine-3'-phosphate
  modified_base 10: mod_base = OTHER; note = 2'-fluorocytidine-3'-phosphate
  modified_base 11: mod_base = OTHER; note = 2'-O-methylguanosine-3'-phosphate
  modified_base 12: mod_base = OTHER; note = 2'-fluorocytidine-3'-phosphate
  modified_base 13: mod_base = OTHER; note = 2'-O-methylcytidine-3'-phosphate
  modified_base 14: mod_base = OTHER; note = 2'-fluoroadenosine-3'-phosphate
  modified_base 15: mod_base = OTHER; note = 2'-O-methylguanosine-3'-phosphate
  modified_base 16: mod_base = OTHER; note = 2'-fluoroguanosine-3'-phosphate
  modified_base 17: mod_base = OTHER; note = 2'-O-methyluridine-3'-phosphate
  modified_base 18: mod_base = OTHER; note = 2'-fluoroadenosine-3'-phosphate
  modified_base 19: mod_base = OTHER; note = 2'-O-methylguanosine-3'-phosphorothioate
  modified_base 20: mod_base = OTHER; note = 2'-O-methyladenosine-3'-phosphorothioate
  modified_base 21: mod_base = OTHER; note = 2'-O-methyladenosine
aacaatctccgccaggtagaa

SEQ ID NO: 981 - RNA, 21 nt, synthetic construct
  source 1..21: mol_type = other RNA
  modified_base 1: mod_base = OTHER; note = 5'-phosphate-2'-O-methyladenosine-3'-phosphorothioate
  modified_base 2: mod_base = OTHER; note = 2'-fluorouridine-3'-phosphorothioate
  modified_base 3: mod_base = OTHER; note = 2'-O-methylguanosine-3'-phosphate
  modified_base 4: mod_base = OTHER; note = 2'-fluoroadenosine-3'-phosphate
  modified_base 5: mod_base = OTHER; note = 2'-O-methylcytidine-3'-phosphate
  modified_base 6: mod_base = OTHER; note = 2'-fluoroadenosine-3'-phosphate
  modified_base 7: mod_base = OTHER; note = 2'-O-methyladenosine-3'-phosphate
  modified_base 8: mod_base = OTHER; note = 2'-fluorouridine-3'-phosphate
  modified_base 9: mod_base = OTHER; note = 2'-O-methylcytidine-3'-phosphate
  modified_base 10: mod_base = OTHER; note = 2'-fluorouridine-3'-phosphate
  modified_base 11: mod_base = OTHER; note = 2'-O-methylcytidine-3'-phosphate
  modified_base 12: mod_base = OTHER; note = 2'-fluorocytidine-3'-phosphate
  modified_base 13: mod_base = OTHER; note = 2'-O-methylguanosine-3'-phosphate
  modified_base 14: mod_base = OTHER; note = 2'-fluorocytidine-3'-phosphate
  modified_base 15: mod_base = OTHER; note = 2'-O-methylcytidine-3'-phosphate
  modified_base 16: mod_base = OTHER; note = 2'-fluoroadenosine-3'-phosphate
  modified_base 17: mod_base = OTHER; note = 2'-O-methylguanosine-3'-phosphate
  modified_base 18: mod_base = OTHER; note = 2'-fluoroguanosine-3'-phosphate
  modified_base 19: mod_base = OTHER; note = 2'-O-methyluridine-3'-phosphorothioate
  modified_base 20: mod_base = OTHER; note = 2'-O-methyladenosine-3'-phosphorothioate
  modified_base 21: mod_base = OTHER; note = 2'-O-methylguanosine
atgacaatctccgccaggtag

SEQ ID NO: 982 - RNA, 21 nt, synthetic construct
  source 1..21: mol_type = other RNA
  modified_base 1: mod_base = OTHER; note = 5'-phosphate-2'-O-methylcytidine-3'-phosphorothioate
  modified_base 2: mod_base = OTHER; note = 2'-fluoroadenosine-3'-phosphorothioate
  modified_base 3: mod_base = OTHER; note = 2'-O-methyluridine-3'-phosphate
  modified_base 4: mod_base = OTHER; note = 2'-fluoroguanosine-3'-phosphate
  modified_base 5: mod_base = OTHER; note = 2'-O-methyladenosine-3'-phosphate
  modified_base 6: mod_base = OTHER; note = 2'-fluorocytidine-3'-phosphate
  modified_base 7: mod_base = OTHER; note = 2'-O-methyladenosine-3'-phosphate
  modified_base 8: mod_base = OTHER; note = 2'-fluoroadenosine-3'-phosphate
  modified_base 9: mod_base = OTHER; note = 2'-O-methyluridine-3'-phosphate
  modified_base 10: mod_base = OTHER; note = 2'-fluorocytidine-3'-phosphate
  modified_base 11: mod_base = OTHER; note = 2'-O-methyluridine-3'-phosphate
  modified_base 12: mod_base = OTHER; note = 2'-fluorocytidine-3'-phosphate
  modified_base 13: mod_base = OTHER; note = 2'-O-methylcytidine-3'-phosphate
  modified_base 14: mod_base = OTHER; note = 2'-fluoroguanosine-3'-phosphate
  modified_base 15: mod_base = OTHER; note = 2'-O-methylcytidine-3'-phosphate
  modified_base 16: mod_base = OTHER; note = 2'-fluorocytidine-3'-phosphate
  modified_base 17: mod_base = OTHER; note = 2'-O-methyladenosine-3'-phosphate
  modified_base 18: mod_base = OTHER; note = 2'-fluoroguanosine-3'-phosphate
  modified_base 19: mod_base = OTHER; note = 2'-O-methylguanosine-3'-phosphorothioate
  modified_base 20: mod_base = OTHER; note = 2'-O-methyluridine-3'-phosphorothioate
  modified_base 21: mod_base = OTHER; note = 2'-O-methyladenosine
catgacaatctccgccaggta

SEQ ID NO: 983 - RNA, 21 nt, synthetic construct
  source 1..21: mol_type = other RNA
  modified_base 1: mod_base = OTHER; note = 5'-phosphate-2'-O-methyladenosine-3'-phosphorothioate
  modified_base 2: mod_base = OTHER; note = 2'-fluorouridine-3'-phosphorothioate
  modified_base 3: mod_base = OTHER; note = 2'-O-methylguanosine-3'-phosphate
  modified_base 4: mod_base = OTHER; note = 2'-fluoroguanosine-3'-phosphate
  modified_base 5: mod_base = OTHER; note = 2'-O-methylcytidine-3'-phosphate
  modified_base 6: mod_base = OTHER; note = 2'-fluorocytidine-3'-phosphate
  modified_base 7: mod_base = OTHER; note = 2'-O-methyladenosine-3'-phosphate
  modified_base 8: mod_base = OTHER; note = 2'-fluorouridine-3'-phosphate
  modified_base 9: mod_base = OTHER; note = 2'-O-methylguanosine-3'-phosphate
  modified_base 10: mod_base = OTHER; note = 2'-fluoroadenosine-3'-phosphate
  modified_base 11: mod_base = OTHER; note = 2'-O-methylcytidine-3'-phosphate
  modified_base 12: mod_base = OTHER; note = 2'-fluoroadenosine-3'-phosphate
  modified_base 13: mod_base = OTHER; note = 2'-O-methyladenosine-3'-phosphate
  modified_base 14: mod_base = OTHER; note = 2'-fluorouridine-3'-phosphate
  modified_base 15: mod_base = OTHER; note = 2'-O-methylcytidine-3'-phosphate
  modified_base 16: mod_base = OTHER; note = 2'-fluorouridine-3'-phosphate
  modified_base 17: mod_base = OTHER; note = 2'-O-methylcytidine-3'-phosphate
  modified_base 18: mod_base = OTHER; note = 2'-fluorocytidine-3'-phosphate
  modified_base 19: mod_base = OTHER; note = 2'-O-methylguanosine-3'-phosphorothioate
  modified_base 20: mod_base = OTHER; note = 2'-O-methylcytidine-3'-phosphorothioate
  modified_base 21: mod_base = OTHER; note = 2'-O-methylcytidine
atggccatgacaatctccgcc

SEQ ID NO: 984 - RNA, 21 nt, synthetic construct
  source 1..21: mol_type = other RNA
  modified_base 1: mod_base = OTHER; note = 5'-phosphate-2'-O-methyluridine-3'-phosphorothioate
  modified_base 2: mod_base = OTHER; note = 2'-fluoroadenosine-3'-phosphorothioate
  modified_base 3: mod_base = OTHER; note = 2'-O-methyluridine-3'-phosphate
  modified_base 4: mod_base = OTHER; note = 2'-fluoroguanosine-3'-phosphate
  modified_base 5: mod_base = OTHER; note = 2'-O-methylguanosine-3'-phosphate
  modified_base 6: mod_base = OTHER; note = 2'-fluorocytidine-3'-phosphate
  modified_base 7: mod_base = OTHER; note = 2'-O-methylcytidine-3'-phosphate
  modified_base 8: mod_base = OTHER; note = 2'-fluoroadenosine-3'-phosphate
  modified_base 9: mod_base = OTHER; note = 2'-O-methyluridine-3'-phosphate
  modified_base 10: mod_base = OTHER; note = 2'-fluoroguanosine-3'-phosphate
  modified_base 11: mod_base = OTHER; note = 2'-O-methyladenosine-3'-phosphate
  modified_base 12: mod_base = OTHER; note = 2'-fluorocytidine-3'-phosphate
  modified_base 13: mod_base = OTHER; note = 2'-O-methyladenosine-3'-phosphate
  modified_base 14: mod_base = OTHER; note = 2'-fluoroadenosine-3'-phosphate
  modified_base 15: mod_base = OTHER; note = 2'-O-methyluridine-3'-phosphate
  modified_base 16: mod_base = OTHER; note = 2'-fluorocytidine-3'-phosphate
  modified_base 17: mod_base = OTHER; note = 2'-O-methyluridine-3'-phosphate
  modified_base 18: mod_base = OTHER; note = 2'-fluorocytidine-3'-phosphate
  modified_base 19: mod_base = OTHER; note = 2'-O-methylcytidine-3'-phosphorothioate
  modified_base 20: mod_base = OTHER; note = 2'-O-methylguanosine-3'-phosphorothioate
  modified_base 21: mod_base = OTHER; note = 2'-O-methylcytidine
tatggccatgacaatctccgc

SEQ ID NO: 985 - RNA, 21 nt, synthetic construct
  source 1..21: mol_type = other RNA
  modified_base 1: mod_base = OTHER; note = 5'-phosphate-2'-O-methyluridine-3'-phosphorothioate
  modified_base 2: mod_base = OTHER; note = 2'-fluorouridine-3'-phosphorothioate
  modified_base 3: mod_base = OTHER; note = 2'-O-methylguanosine-3'-phosphate
  modified_base 4: mod_base = OTHER; note = 2'-fluorouridine-3'-phosphate
  modified_base 5: mod_base = OTHER; note = 2'-O-methylcytidine-3'-phosphate
  modified_base 6: mod_base = OTHER; note = 2'-fluoroguanosine-3'-phosphate
  modified_base 7: mod_base = OTHER; note = 2'-O-methylguanosine-3'-phosphate
  modified_base 8: mod_base = OTHER; note = 2'-fluoroguanosine-3'-phosphate
  modified_base 9: mod_base = OTHER; note = 2'-O-methyluridine-3'-phosphate
  modified_base 10: mod_base = OTHER; note = 2'-fluorouridine-3'-phosphate
  modified_base 11: mod_base = OTHER; note = 2'-O-methyluridine-3'-phosphate
  modified_base 12: mod_base = OTHER; note = 2'-fluoroguanosine-3'-phosphate
  modified_base 13: mod_base = OTHER; note = 2'-O-methyladenosine-3'-phosphate
  modified_base 14: mod_base = OTHER; note = 2'-fluorouridine-3'-phosphate
  modified_base 15: mod_base = OTHER; note = 2'-O-methylguanosine-3'-phosphate
  modified_base 16: mod_base = OTHER; note = 2'-fluorouridine-3'-phosphate
  modified_base 17: mod_base = OTHER; note = 2'-O-methylcytidine-3'-phosphate
  modified_base 18: mod_base = OTHER; note = 2'-fluorocytidine-3'-phosphate
  modified_base 19: mod_base = OTHER; note = 2'-O-methylcytidine-3'-phosphorothioate
  modified_base 20: mod_base = OTHER; note = 2'-O-methyluridine-3'-phosphorothioate
  modified_base 21: mod_base = OTHER; note = 2'-O-methylguanosine
ttgtcgggtttgatgtccctg

SEQ ID NO: 986 - RNA, 21 nt, synthetic construct
  source 1..21: mol_type = other RNA
  modified_base 1: mod_base = OTHER; note = 5'-phosphate-2'-O-methyladenosine-3'-phosphorothioate
  modified_base 2: mod_base = OTHER; note = 2'-fluorouridine-3'-phosphorothioate
  modified_base 3: mod_base = OTHER; note = 2'-O-methyluridine-3'-phosphate
  modified_base 4: mod_base = OTHER; note = 2'-fluoroguanosine-3'-phosphate
  modified_base 5: mod_base = OTHER; note = 2'-O-methyluridine-3'-phosphate
  modified_base 6: mod_base = OTHER; note = 2'-fluorocytidine-3'-phosphate
  modified_base 7: mod_base = OTHER; note = 2'-O-methylguanosine-3'-phosphate
  modified_base 8: mod_base = OTHER; note = 2'-fluoroguanosine-3'-phosphate
  modified_base 9: mod_base = OTHER; note = 2'-O-methylguanosine-3'-phosphate
  modified_base 10: mod_base = OTHER; note = 2'-fluorouridine-3'-phosphate
  modified_base 11: mod_base = OTHER; note = 2'-O-methyluridine-3'-phosphate
  modified_base 12: mod_base = OTHER; note = 2'-fluorouridine-3'-phosphate
  modified_base 13: mod_base = OTHER; note = 2'-O-methylguanosine-3'-phosphate
  modified_base 14: mod_base = OTHER; note = 2'-fluoroadenosine-3'-phosphate
  modified_base 15: mod_base = OTHER; note = 2'-O-methyluridine-3'-phosphate
  modified_base 16: mod_base = OTHER; note = 2'-fluoroguanosine-3'-phosphate
  modified_base 17: mod_base = OTHER; note = 2'-O-methyluridine-3'-phosphate
  modified_base 18: mod_base = OTHER; note = 2'-fluorocytidine-3'-phosphate
  modified_base 19: mod_base = OTHER; note = 2'-O-methylcytidine-3'-phosphorothioate
  modified_base 20: mod_base = OTHER; note = 2'-O-methylcytidine-3'-phosphorothioate
  modified_base 21: mod_base = OTHER; note = 2'-O-methyluridine
attgtcgggtttgatgtccct

SEQ ID NO: 987 - RNA, 21 nt, synthetic construct
  source 1..21: mol_type = other RNA
  modified_base 1: mod_base = OTHER; note = 5'-phosphate-2'-O-methyluridine-3'-phosphorothioate
  modified_base 2: mod_base = OTHER; note = 2'-fluoroguanosine-3'-phosphorothioate
  modified_base 3: mod_base = OTHER; note = 2'-O-methyluridine-3'-phosphate
  modified_base 4: mod_base = OTHER; note = 2'-fluorouridine-3'-phosphate
  modified_base 5: mod_base = OTHER; note = 2'-O-methylguanosine-3'-phosphate
  modified_base 6: mod_base = OTHER; note = 2'-fluorouridine-3'-phosphate
  modified_base 7: mod_base = OTHER; note = 2'-O-methylcytidine-3'-phosphate
  modified_base 8: mod_base = OTHER; note = 2'-fluoroguanosine-3'-phosphate
  modified_base 9: mod_base = OTHER; note = 2'-O-methylguanosine-3'-phosphate
  modified_base 10: mod_base = OTHER; note = 2'-fluoroguanosine-3'-phosphate
  modified_base 11: mod_base = OTHER; note = 2'-O-methyluridine-3'-phosphate
  modified_base 12: mod_base = OTHER; note = 2'-fluorouridine-3'-phosphate
  modified_base 13: mod_base = OTHER; note = 2'-O-methyluridine-3'-phosphate
  modified_base 14: mod_base = OTHER; note = 2'-fluoroguanosine-3'-phosphate
  modified_base 15: mod_base = OTHER; note = 2'-O-methyladenosine-3'-phosphate
  modified_base 16: mod_base = OTHER; note = 2'-fluorouridine-3'-phosphate
  modified_base 17: mod_base = OTHER; note = 2'-O-methylguanosine-3'-phosphate
  modified_base 18: mod_base = OTHER; note = 2'-fluorouridine-3'-phosphate
  modified_base 19: mod_base = OTHER; note = 2'-O-methylcytidine-3'-phosphorothioate
  modified_base 20: mod_base = OTHER; note = 2'-O-methylcytidine-3'-phosphorothioate
  modified_base 21: mod_base = OTHER; note = 2'-O-methylcytidine
tgttgtcgggtttgatgtccc

SEQ ID NO: 988 - RNA, 21 nt, synthetic construct
  source 1..21: mol_type = other RNA
  modified_base 1: mod_base = OTHER; note = 5'-phosphate-2'-O-methyladenosine-3'-phosphorothioate
  modified_base 2: mod_base = OTHER; note = 2'-fluorouridine-3'-phosphorothioate
  modified_base 3: mod_base = OTHER; note = 2'-O-methylguanosine-3'-phosphate
  modified_base 4: mod_base = OTHER; note = 2'-fluorouridine-3'-phosphate
  modified_base 5: mod_base = OTHER; note = 2'-O-methyluridine-3'-phosphate
  modified_base 6: mod_base = OTHER; note = 2'-fluoroguanosine-3'-phosphate
  modified_base 7: mod_base = OTHER; note = 2'-O-methyluridine-3'-phosphate
  modified_base 8: mod_base = OTHER; note = 2'-fluorocytidine-3'-phosphate
  modified_base 9: mod_base = OTHER; note = 2'-O-methylguanosine-3'-phosphate
  modified_base 10: mod_base = OTHER; note = 2'-fluoroguanosine-3'-phosphate
  modified_base 11: mod_base = OTHER; note = 2'-O-methylguanosine-3'-phosphate
  modified_base 12: mod_base = OTHER; note = 2'-fluorouridine-3'-phosphate
  modified_base 13: mod_base = OTHER; note = 2'-O-methyluridine-3'-phosphate
  modified_base 14: mod_base = OTHER; note = 2'-fluorouridine-3'-phosphate
  modified_base 15: mod_base = OTHER; note = 2'-O-methylguanosine-3'-phosphate
  modified_base 16: mod_base = OTHER; note = 2'-fluoroadenosine-3'-phosphate
  modified_base 17: mod_base = OTHER; note = 2'-O-methyluridine-3'-phosphate
  modified_base 18: mod_base = OTHER; note = 2'-fluoroguanosine-3'-phosphate
  modified_base 19: mod_base = OTHER; note = 2'-O-methyluridine-3'-phosphorothioate
  modified_base 20: mod_base = OTHER; note = 2'-O-methylcytidine-3'-phosphorothioate
  modified_base 21: mod_base = OTHER; note = 2'-O-methylcytidine
atgttgtcgggtttgatgtcc

SEQ ID NO: 989 - RNA, 21 nt, synthetic construct
  source 1..21: mol_type = other RNA
  modified_base 1: mod_base = OTHER; note = 5'-phosphate-2'-O-methyladenosine-3'-phosphorothioate
  modified_base 2: mod_base = OTHER; note = 2'-fluoroadenosine-3'-phosphorothioate
  modified_base 3: mod_base = OTHER; note = 2'-O-methyluridine-3'-phosphate
  modified_base 4: mod_base = OTHER; note = 2'-fluoroguanosine-3'-phosphate
  modified_base 5: mod_base = OTHER; note = 2'-O-methyluridine-3'-phosphate
  modified_base 6: mod_base = OTHER; note = 2'-fluorouridine-3'-phosphate
  modified_base 7: mod_base = OTHER; note = 2'-O-methylguanosine-3'-phosphate
  modified_base 8: mod_base = OTHER; note = 2'-fluorouridine-3'-phosphate
  modified_base 9: mod_base = OTHER; note = 2'-O-methylcytidine-3'-phosphate
  modified_base 10: mod_base = OTHER; note = 2'-fluoroguanosine-3'-phosphate
  modified_base 11: mod_base = OTHER; note = 2'-O-methylguanosine-3'-phosphate
  modified_base 12: mod_base = OTHER; note = 2'-fluoroguanosine-3'-phosphate
  modified_base 13: mod_base = OTHER; note = 2'-O-methyluridine-3'-phosphate
  modified_base 14: mod_base = OTHER; note = 2'-fluorouridine-3'-phosphate
  modified_base 15: mod_base = OTHER; note = 2'-O-methyluridine-3'-phosphate
  modified_base 16: mod_base = OTHER; note = 2'-fluoroguanosine-3'-phosphate
  modified_base 17: mod_base = OTHER; note = 2'-O-methyladenosine-3'-phosphate
  modified_base 18: mod_base = OTHER; note = 2'-fluorouridine-3'-phosphate
  modified_base 19: mod_base = OTHER; note = 2'-O-methylguanosine-3'-phosphorothioate
  modified_base 20: mod_base = OTHER; note = 2'-O-methyluridine-3'-phosphorothioate
  modified_base 21: mod_base = OTHER; note = 2'-O-methylcytidine
aatgttgtcgggtttgatgtc

SEQ ID NO: 990 - RNA, 21 nt, synthetic construct
  source 1..21: mol_type = other RNA
  modified_base 1: mod_base = OTHER; note = 5'-phosphate-2'-O-methyladenosine-3'-phosphorothioate
  modified_base 2: mod_base = OTHER; note = 2'-fluoroadenosine-3'-phosphorothioate
  modified_base 3: mod_base = OTHER; note = 2'-O-methylguanosine-3'-phosphate
  modified_base 4: mod_base = OTHER; note = 2'-fluorocytidine-3'-phosphate
  modified_base 5: mod_base = OTHER; note = 2'-O-methyladenosine-3'-phosphate
  modified_base 6: mod_base = OTHER; note = 2'-fluoroguanosine-3'-phosphate
  modified_base 7: mod_base = OTHER; note = 2'-O-methylguanosine-3'-phosphate
  modified_base 8: mod_base = OTHER; note = 2'-fluoroadenosine-3'-phosphate
  modified_base 9: mod_base = OTHER; note = 2'-O-methyluridine-3'-phosphate
  modified_base 10: mod_base = OTHER; note = 2'-fluoroguanosine-3'-phosphate
  modified_base 11: mod_base = OTHER; note = 2'-O-methyluridine-3'-phosphate
  modified_base 12: mod_base = OTHER; note = 2'-fluorouridine-3'-phosphate
  modified_base 13: mod_base = OTHER; note = 2'-O-methylguanosine-3'-phosphate
  modified_base 14: mod_base = OTHER; note = 2'-fluorouridine-3'-phosphate
  modified_base 15: mod_base = OTHER; note = 2'-O-methylcytidine-3'-phosphate
  modified_base 16: mod_base = OTHER; note = 2'-fluoroguanosine-3'-phosphate
  modified_base 17: mod_base = OTHER; note = 2'-O-methylguanosine-3'-phosphate
  modified_base 18: mod_base = OTHER; note = 2'-fluoroguanosine-3'-phosphate
  modified_base 19: mod_base = OTHER; note = 2'-O-methyluridine-3'-phosphorothioate
  modified_base 20: mod_base = OTHER; note = 2'-O-methyluridine-3'-phosphorothioate
  modified_base 21: mod_base = OTHER; note = 2'-O-methyluridine
aagcaggatgttgtcgggttt

SEQ ID NO: 991 - RNA, 21 nt, synthetic construct
  source 1..21: mol_type = other RNA
  modified_base 1: mod_base = OTHER; note = 5'-phosphate-2'-O-methyladenosine-3'-phosphorothioate
  modified_base 2: mod_base = OTHER; note = 2'-fluorouridine-3'-phosphorothioate
  modified_base 3: mod_base = OTHER; note = 2'-O-methylcytidine-3'-phosphate
  modified_base 4: mod_base = OTHER; note = 2'-fluorocytidine-3'-phosphate
  modified_base 5: mod_base = OTHER; note = 2'-O-methyladenosine-3'-phosphate
  modified_base 6: mod_base = OTHER; note = 2'-fluoroguanosine-3'-phosphate
  modified_base 7: mod_base = OTHER; note = 2'-O-methylcytidine-3'-phosphate
  modified_base 8: mod_base = OTHER; note = 2'-fluoroadenosine-3'-phosphate
  modified_base 9: mod_base = OTHER; note = 2'-O-methylguanosine-3'-phosphate
  modified_base 10: mod_base = OTHER; note = 2'-fluoroguanosine-3'-phosphate
  modified_base 11: mod_base = OTHER; note = 2'-O-methyladenosine-3'-phosphate
  modified_base 12: mod_base = OTHER; note = 2'-fluorouridine-3'-phosphate
  modified_base 13: mod_base = OTHER; note = 2'-O-methylguanosine-3'-phosphate
  modified_base 14: mod_base = OTHER; note = 2'-fluorouridine-3'-phosphate
  modified_base 15: mod_base = OTHER; note = 2'-O-methyluridine-3'-phosphate
  modified_base 16: mod_base = OTHER; note = 2'-fluoroguanosine-3'-phosphate
  modified_base 17: mod_base = OTHER; note = 2'-O-methyluridine-3'-phosphate
  modified_base 18: mod_base = OTHER; note = 2'-fluorocytidine-3'-phosphate
  modified_base 19: mod_base = OTHER; note = 2'-O-methylguanosine-3'-phosphorothioate
  modified_base 20: mod_base = OTHER; note = 2'-O-methylguanosine-3'-phosphorothioate
  modified_base 21: mod_base = OTHER; note = 2'-O-methylguanosine
atccagcaggatgttgtcggg

SEQ ID NO: 992 - RNA, 21 nt, synthetic construct
  source 1..21: mol_type = other RNA
  modified_base 1: mod_base = OTHER; note = 5'-phosphate-2'-O-methyladenosine-3'-phosphorothioate
  modified_base 2: mod_base = OTHER; note = 2'-fluoroadenosine-3'-phosphorothioate
  modified_base 3: mod_base = OTHER; note = 2'-O-methylguanosine-3'-phosphate
  modified_base 4: mod_base = OTHER; note = 2'-fluorocytidine-3'-phosphate
  modified_base 5: mod_base = OTHER; note = 2'-O-methylguanosine-3'-phosphate
  modified_base 6: mod_base = OTHER; note = 2'-fluoroguanosine-3'-phosphate
  modified_base 7: mod_base = OTHER; note = 2'-O-methyluridine-3'-phosphate
  modified_base 8: mod_base = OTHER; note = 2'-fluorocytidine-3'-phosphate
  modified_base 9: mod_base = OTHER; note = 2'-O-methylcytidine-3'-phosphate
  modified_base 10: mod_base = OTHER; note = 2'-fluoroadenosine-3'-phosphate
  modified_base 11: mod_base = OTHER; note = 2'-O-methylguanosine-3'-phosphate
  modified_base 12: mod_base = OTHER; note = 2'-fluorocytidine-3'-phosphate
  modified_base 13: mod_base = OTHER; note = 2'-O-methyladenosine-3'-phosphate
  modified_base 14: mod_base = OTHER; note = 2'-fluoroguanosine-3'-phosphate
  modified_base 15: mod_base = OTHER; note = 2'-O-methylguanosine-3'-phosphate
  modified_base 16: mod_base = OTHER; note = 2'-fluoroadenosine-3'-phosphate
  modified_base 17: mod_base = OTHER; note = 2'-O-methyluridine-3'-phosphate
  modified_base 18: mod_base = OTHER; note = 2'-fluoroguanosine-3'-phosphate
  modified_base 19: mod_base = OTHER; note = 2'-O-methyluridine-3'-phosphorothioate
  modified_base 20: mod_base = OTHER; note = 2'-O-methyluridine-3'-phosphorothioate
  modified_base 21: mod_base = OTHER; note = 2'-O-methylguanosine
aagcggtccagcaggatgttg

SEQ ID NO: 993 - RNA, 21 nt, synthetic construct
  source 1..21: mol_type = other RNA
  modified_base 1: mod_base = OTHER; note = 5'-phosphate-2'-O-methyladenosine-3'-phosphorothioate
  modified_base 2: mod_base = OTHER; note = 2'-fluoroadenosine-3'-phosphorothioate
  modified_base 3: mod_base = OTHER; note = 2'-O-methylcytidine-3'-phosphate
  modified_base 4: mod_base = OTHER; note = 2'-fluoroadenosine-3'-phosphate
  modified_base 5: mod_base = OTHER; note = 2'-O-methylguanosine-3'-phosphate
  modified_base 6: mod_base = OTHER; note = 2'-fluorocytidine-3'-phosphate
  modified_base 7: mod_base = OTHER; note = 2'-O-methylguanosine-3'-phosphate
  modified_base 8: mod_base = OTHER; note = 2'-fluoroguanosine-3'-phosphate
  modified_base 9: mod_base = OTHER; note = 2'-O-methyluridine-3'-phosphate
  modified_base 10: mod_base = OTHER; note = 2'-fluorocytidine-3'-phosphate
  modified_base 11: mod_base = OTHER; note = 2'-O-methylcytidine-3'-phosphate
  modified_base 12: mod_base = OTHER; note = 2'-fluoroadenosine-3'-phosphate
  modified_base 13: mod_base = OTHER; note = 2'-O-methylguanosine-3'-phosphate
  modified_base 14: mod_base = OTHER; note = 2'-fluorocytidine-3'-phosphate
  modified_base 15: mod_base = OTHER; note = 2'-O-methyladenosine-3'-phosphate
  modified_base 16: mod_base = OTHER; note = 2'-fluoroguanosine-3'-phosphate
  modified_base 17: mod_base = OTHER; note = 2'-O-methylguanosine-3'-phosphate
  modified_base 18: mod_base = OTHER; note = 2'-fluoroadenosine-3'-phosphate
  modified_base 19: mod_base = OTHER; note = 2'-O-methyluridine-3'-phosphorothioate
  modified_base 20: mod_base = OTHER; note = 2'-O-methylguanosine-3'-phosphorothioate
  modified_base 21: mod_base = OTHER; note = 2'-O-methyluridine
aacagcggtccagcaggatgt

SEQ ID NO: 994 - RNA, 21 nt, synthetic construct
  source 1..21: mol_type = other RNA
  modified_base 1: mod_base = OTHER; note = 5'-phosphate-2'-O-methyladenosine-3'-phosphorothioate
  modified_base 2: mod_base = OTHER; note = 2'-fluorouridine-3'-phosphorothioate
  modified_base 3: mod_base = OTHER; note = 2'-O-methylguanosine-3'-phosphate
  modified_base 4: mod_base = OTHER; note = 2'-fluorouridine-3'-phosphate
  modified_base 5: mod_base = OTHER; note = 2'-O-methylguanosine-3'-phosphate
  modified_base 6: mod_base = OTHER; note = 2'-fluoroguanosine-3'-phosphate
  modified_base 7: mod_base = OTHER; note = 2'-O-methylcytidine-3'-phosphate
  modified_base 8: mod_base = OTHER; note = 2'-fluorocytidine-3'-phosphate
  modified_base 9: mod_base = OTHER; note = 2'-O-methyladenosine-3'-phosphate
  modified_base 10: mod_base = OTHER; note = 2'-fluorocytidine-3'-phosphate
  modified_base 11: mod_base = OTHER; note = 2'-O-methyladenosine-3'-phosphate
  modified_base 12: mod_base = OTHER; note = 2'-fluoroguanosine-3'-phosphate
  modified_base 13: mod_base = OTHER; note = 2'-O-methylcytidine-3'-phosphate
  modified_base 14: mod_base = OTHER; note = 2'-fluoroguanosine-3'-phosphate
  modified_base 15: mod_base = OTHER; note = 2'-O-methylguanosine-3'-phosphate
  modified_base 16: mod_base = OTHER; note = 2'-fluorouridine-3'-phosphate
  modified_base 17: mod_base = OTHER; note = 2'-O-methylcytidine-3'-phosphate
  modified_base 18: mod_base = OTHER; note = 2'-fluorocytidine-3'-phosphate
  modified_base 19: mod_base = OTHER; note = 2'-O-methyladenosine-3'-phosphorothioate
  modified_base 20: mod_base = OTHER; note = 2'-O-methylguanosine-3'-phosphorothioate
  modified_base 21: mod_base = OTHER; note = 2'-O-methylcytidine
atgtggccacagcggtccagc

SEQ ID NO: 995 - RNA, 21 nt, synthetic construct
  source 1..21: mol_type = other RNA
  modified_base 1: mod_base = OTHER; note = 5'-phosphate-2'-O-methyladenosine-3'-phosphorothioate
  modified_base 2: mod_base = OTHER; note = 2'-fluoroadenosine-3'-phosphorothioate
  modified_base 3: mod_base = OTHER; note = 2'-O-methyluridine-3'-phosphate
  modified_base 4: mod_base = OTHER; note = 2'-fluoroguanosine-3'-phosphate
  modified_base 5: mod_base = OTHER; note = 2'-O-methyluridine-3'-phosphate
  modified_base 6: mod_base = OTHER; note = 2'-fluoroguanosine-3'-phosphate
  modified_base 7: mod_base = OTHER; note = 2'-O-methylguanosine-3'-phosphate
  modified_base 8: mod_base = OTHER; note = 2'-fluorocytidine-3'-phosphate
  modified_base 9: mod_base = OTHER; note = 2'-O-methylcytidine-3'-phosphate
  modified_base 10: mod_base = OTHER; note = 2'-fluoroadenosine-3'-phosphate
  modified_base 11: mod_base = OTHER; note = 2'-O-methylcytidine-3'-phosphate
  modified_base 12: mod_base = OTHER; note = 2'-fluoroadenosine-3'-phosphate
  modified_base 13: mod_base = OTHER; note = 2'-O-methylguanosine-3'-phosphate
  modified_base 14: mod_base = OTHER; note = 2'-fluorocytidine-3'-phosphate
  modified_base 15: mod_base = OTHER; note = 2'-O-methylguanosine-3'-phosphate
  modified_base 16: mod_base = OTHER; note = 2'-fluoroguanosine-3'-phosphate
  modified_base 17: mod_base = OTHER; note = 2'-O-methyluridine-3'-phosphate
  modified_base 18: mod_base = OTHER; note = 2'-fluorocytidine-3'-phosphate
  modified_base 19: mod_base = OTHER; note = 2'-O-methylcytidine-3'-phosphorothioate
  modified_base 20: mod_base = OTHER; note = 2'-O-methyladenosine-3'-phosphorothioate
  modified_base 21: mod_base = OTHER; note = 2'-O-methylguanosine
aatgtggccacagcggtccag

SEQ ID NO: 996 - RNA, 21 nt, synthetic construct
  source 1..21: mol_type = other RNA
  modified_base 1: mod_base = OTHER; note = 5'-phosphate-2'-O-methyladenosine-3'-phosphorothioate
  modified_base 2: mod_base = OTHER; note = 2'-fluoroguanosine-3'-phosphorothioate
  modified_base 3: mod_base = OTHER; note = 2'-O-methyluridine-3'-phosphate
  modified_base 4: mod_base = OTHER; note = 2'-fluorocytidine-3'-phosphate
  modified_base 5: mod_base = OTHER; note = 2'-O-methylguanosine-3'-phosphate
  modified_base 6: mod_base = OTHER; note = 2'-fluoroguanosine-3'-phosphate
  modified_base 7: mod_base = OTHER; note = 2'-O-methylcytidine-3'-phosphate
  modified_base 8: mod_base = OTHER; note = 2'-fluorocytidine-3'-phosphate
  modified_base 9: mod_base = OTHER; note = 2'-O-methyladenosine-3'-phosphate
  modified_base 10: mod_base = OTHER; note = 2'-fluoroguanosine-3'-phosphate
  modified_base 11: mod_base = OTHER; note = 2'-O-methylguanosine-3'-phosphate
  modified_base 12: mod_base = OTHER; note = 2'-fluorocytidine-3'-phosphate
  modified_base 13: mod_base = OTHER; note = 2'-O-methylguanosine-3'-phosphate
  modified_base 14: mod_base = OTHER; note = 2'-fluoroguanosine-3'-phosphate
  modified_base 15: mod_base = OTHER; note = 2'-O-methyladenosine-3'-phosphate
  modified_base 16: mod_base = OTHER; note = 2'-fluorouridine-3'-phosphate
  modified_base 17: mod_base = OTHER; note = 2'-O-methylguanosine-3'-phosphate
  modified_base 18: mod_base = OTHER; note = 2'-fluorouridine-3'-phosphate
  modified_base 19: mod_base = OTHER; note = 2'-O-methylguanosine-3'-phosphorothioate
  modified_base 20: mod_base = OTHER; note = 2'-O-methylguanosine-3'-phosphorothioate
  modified_base 21: mod_base = OTHER; note = 2'-O-methylcytidine
agtcggccaggcggatgtggc

SEQ ID NO: 997 - RNA, 21 nt, synthetic construct
  source 1..21: mol_type = other RNA
  modified_base 1: mod_base = OTHER; note = 5'-phosphate-2'-O-methyladenosine-3'-phosphorothioate
  modified_base 2: mod_base = OTHER; note = 2'-fluoroadenosine-3'-phosphorothioate
  modified_base 3: mod_base = OTHER; note = 2'-O-methylguanosine-3'-phosphate
  modified_base 4: mod_base = OTHER; note = 2'-fluorouridine-3'-phosphate
  modified_base 5: mod_base = OTHER; note = 2'-O-methylcytidine-3'-phosphate
  modified_base 6: mod_base = OTHER; note = 2'-fluoroguanosine-3'-phosphate
  modified_base 7: mod_base = OTHER; note = 2'-O-methylguanosine-3'-phosphate
  modified_base 8: mod_base = OTHER; note = 2'-fluorocytidine-3'-phosphate
  modified_base 9: mod_base = OTHER; note = 2'-O-methylcytidine-3'-phosphate
  modified_base 10: mod_base = OTHER; note = 2'-fluoroadenosine-3'-phosphate
  modified_base 11: mod_base = OTHER; note = 2'-O-methylguanosine-3'-phosphate
  modified_base 12: mod_base = OTHER; note = 2'-fluoroguanosine-3'-phosphate
  modified_base 13: mod_base = OTHER; note = 2'-O-methylcytidine-3'-phosphate
  modified_base 14: mod_base = OTHER; note = 2'-fluoroguanosine-3'-phosphate
  modified_base 15: mod_base = OTHER; note = 2'-O-methylguanosine-3'-phosphate
  modified_base 16: mod_base = OTHER; note = 2'-fluoroadenosine-3'-phosphate
  modified_base 17: mod_base = OTHER; note = 2'-O-methyluridine-3'-phosphate
  modified_base 18: mod_base = OTHER; note = 2'-fluoroguanosine-3'-phosphate
  modified_base 19: mod_base = OTHER; note = 2'-O-methyluridine-3'-phosphorothioate
  modified_base 20: mod_base = OTHER; note = 2'-O-methylguanosine-3'-phosphorothioate
  modified_base 21: mod_base = OTHER; note = 2'-O-methylguanosine
aagtcggccaggcggatgtgg

SEQ ID NO: 998 - RNA, 21 nt, synthetic construct
  source 1..21: mol_type = other RNA
  modified_base 1: mod_base = OTHER; note = 5'-phosphate-2'-O-methylguanosine-3'-phosphorothioate
  modified_base 2: mod_base = OTHER; note = 2'-fluoroadenosine-3'-phosphorothioate
  modified_base 3: mod_base = OTHER; note = 2'-O-methyladenosine-3'-phosphate
  modified_base 4: mod_base = OTHER; note = 2'-fluoroguanosine-3'-phosphate
  modified_base 5: mod_base = OTHER; note = 2'-O-methyluridine-3'-phosphate
  modified_base 6: mod_base = OTHER; note = 2'-fluorocytidine-3'-phosphate
  modified_base 7: mod_base = OTHER; note = 2'-O-methylguanosine-3'-phosphate
  modified_base 8: mod_base = OTHER; note = 2'-fluoroguanosine-3'-phosphate
  modified_base 9: mod_base = OTHER; note = 2'-O-methylcytidine-3'-phosphate
  modified_base 10: mod_base = OTHER; note = 2'-fluorocytidine-3'-phosphate
  modified_base 11: mod_base = OTHER; note = 2'-O-methyladenosine-3'-phosphate
  modified_base 12: mod_base = OTHER; note = 2'-fluoroguanosine-3'-phosphate
  modified_base 13: mod_base = OTHER; note = 2'-O-methylguanosine-3'-phosphate
  modified_base 14: mod_base = OTHER; note = 2'-fluorocytidine-3'-phosphate
  modified_base 15: mod_base = OTHER; note = 2'-O-methylguanosine-3'-phosphate
  modified_base 16: mod_base = OTHER; note = 2'-fluoroguanosine-3'-phosphate
  modified_base 17: mod_base = OTHER; note = 2'-O-methyladenosine-3'-phosphate
  modified_base 18: mod_base = OTHER; note = 2'-fluorouridine-3'-phosphate
  modified_base 19: mod_base = OTHER; note = 2'-O-methylguanosine-3'-phosphorothioate
  modified_base 20: mod_base = OTHER; note = 2'-O-methyluridine-3'-phosphorothioate
  modified_base 21: mod_base = OTHER; note = 2'-O-methylguanosine
gaagtcggccaggcggatgtg

SEQ ID NO: 999 - RNA, 21 nt, synthetic construct
  source 1..21: mol_type = other RNA
  modified_base 1: mod_base = OTHER; note = 5'-phosphate-2'-O-methyladenosine-3'-phosphorothioate
  modified_base 2: mod_base = OTHER; note = 2'-fluoroadenosine-3'-phosphorothioate
  modified_base 3: mod_base = OTHER; note = 2'-O-methylcytidine-3'-phosphate
  modified_base 4: mod_base = OTHER; note = 2'-fluorocytidine-3'-phosphate
  modified_base 5: mod_base = OTHER; note = 2'-O-methylguanosine-3'-phosphate
  modified_base 6: mod_base = OTHER; note = 2'-fluorocytidine-3'-phosphate
  modified_base 7: mod_base = OTHER; note = 2'-O-methyladenosine-3'-phosphate
  modified_base 8: mod_base = OTHER; note = 2'-fluorocytidine-3'-phosphate
  modified_base 9: mod_base = OTHER; note = 2'-O-methylcytidine-3'-phosphate
  modified_base 10: mod_base = OTHER; note = 2'-fluoroguanosine-3'-phosphate
  modified_base 11: mod_base = OTHER; note = 2'-O-methyluridine-3'-phosphate
  modified_base 12: mod_base = OTHER; note = 2'-fluorouridine-3'-phosphate
  modified_base 13: mod_base = OTHER; note = 2'-O-methylcytidine-3'-phosphate
  modified_base 14: mod_base = OTHER; note = 2'-fluorocytidine-3'-phosphate
  modified_base 15: mod_base = OTHER; note = 2'-O-methyladenosine-3'-phosphate
  modified_base 16: mod_base = OTHER; note = 2'-fluorouridine-3'-phosphate
  modified_base 17: mod_base = OTHER; note = 2'-O-methylcytidine-3'-phosphate
  modified_base 18: mod_base = OTHER; note = 2'-fluorouridine-3'-phosphate
  modified_base 19: mod_base = OTHER; note = 2'-O-methylguanosine-3'-phosphorothioate
  modified_base 20: mod_base = OTHER; note = 2'-O-methylcytidine-3'-phosphorothioate
  modified_base 21: mod_base = OTHER; note = 2'-O-methylcytidine
aaccgcaccgttccatctgcc

SEQ ID NO: 1000 - RNA, 21 nt, synthetic construct
  source 1..21: mol_type = other RNA
  modified_base 1: mod_base = OTHER; note = 5'-phosphate-2'-O-methyladenosine-3'-phosphorothioate
  modified_base 2: mod_base = OTHER; note = 2'-fluoroadenosine-3'-phosphorothioate
  modified_base 3: mod_base = OTHER; note = 2'-O-methylcytidine-3'-phosphate
  modified_base 4: mod_base = OTHER; note = 2'-fluoroadenosine-3'-phosphate
  modified_base 5: mod_base = OTHER; note = 2'-O-methylguanosine-3'-phosphate
  modified_base 6: mod_base = OTHER; note = 2'-fluorocytidine-3'-phosphate
  modified_base 7: mod_base = OTHER; note = 2'-O-methylcytidine-3'-phosphate
  modified_base 8: mod_base = OTHER; note = 2'-fluorouridine-3'-phosphate
  modified_base 9: mod_base = OTHER; note = 2'-O-methylguanosine-3'-phosphate
  modified_base 10: mod_base = OTHER; note = 2'-fluorocytidine-3'-phosphate
  modified_base 11: mod_base = OTHER; note = 2'-O-methyladenosine-3'-phosphate
  modified_base 12: mod_base = OTHER; note = 2'-fluoroguanosine-3'-phosphate
  modified_base 13: mod_base = OTHER; note = 2'-O-methylguanosine-3'-phosphate
  modified_base 14: mod_base = OTHER; note = 2'-fluoroadenosine-3'-phosphate
  modified_base 15: mod_base = OTHER; note = 2'-O-methyluridine-3'-phosphate
  modified_base 16: mod_base = OTHER; note = 2'-fluorocytidine-3'-phosphate
  modified_base 17: mod_base = OTHER; note = 2'-O-methyluridine-3'-phosphate
  modified_base 18: mod_base = OTHER; note = 2'-fluorocytidine-3'-phosphate
  modified_base 19: mod_base = OTHER; note = 2'-O-methylguanosine-3'-phosphorothioate
  modified_base 20: mod_base = OTHER; note = 2'-O-methylguanosine-3'-phosphorothioate
  modified_base 21: mod_base = OTHER; note = 2'-O-methylguanosine
aacagcctgcaggatctcggg

SEQ ID NO: 1001 - RNA, 21 nt, synthetic construct
  source 1..21: mol_type = other RNA
  modified_base 1: mod_base = OTHER; note = 5'-phosphate-2'-O-methyluridine-3'-phosphorothioate
  modified_base 2: mod_base = OTHER; note = 2'-fluoroadenosine-3'-phosphorothioate
  modified_base 3: mod_base = OTHER; note = 2'-O-methylguanosine-3'-phosphate
  modified_base 4: mod_base = OTHER; note = 2'-fluorocytidine-3'-phosphate
  modified_base 5: mod_base = OTHER; note = 2'-O-methyluridine-3'-phosphate
  modified_base 6: mod_base = OTHER; note = 2'-fluoroguanosine-3'-phosphate
  modified_base 7: mod_base = OTHER; note = 2'-O-methylcytidine-3'-phosphate
  modified_base 8: mod_base = OTHER; note = 2'-fluorocytidine-3'-phosphate
  modified_base 9: mod_base = OTHER; note = 2'-O-methyluridine-3'-phosphate
  modified_base 10: mod_base = OTHER; note = 2'-fluoroguanosine-3'-phosphate
  modified_base 11: mod_base = OTHER; note = 2'-O-methyluridine-3'-phosphate
  modified_base 12: mod_base = OTHER; note = 2'-fluorocytidine-3'-phosphate
  modified_base 13: mod_base = OTHER; note = 2'-O-methylcytidine-3'-phosphate
  modified_base 14: mod_base = OTHER; note = 2'-fluorocytidine-3'-phosphate
  modified_base 15: mod_base = OTHER; note = 2'-O-methyladenosine-3'-phosphate
  modified_base 16: mod_base = OTHER; note = 2'-fluoroguanosine-3'-phosphate
  modified_base 17: mod_base = OTHER; note = 2'-O-methylguanosine-3'-phosphate
  modified_base 18: mod_base = OTHER; note = 2'-fluorocytidine-3'-phosphate
  modified_base 19: mod_base = OTHER; note = 2'-O-methylcytidine-3'-phosphorothioate
  modified_base 20: mod_base = OTHER; note = 2'-O-methylcytidine-3'-phosphorothioate
  modified_base 21: mod_base = OTHER; note = 2'-O-methyladenosine
tagctgcctgtcccaggccca

SEQ ID NO: 1002 - RNA, 21 nt, synthetic construct
  source 1..21: mol_type = other RNA
  modified_base 1: mod_base = OTHER; note = 5'-phosphate-2'-O-methyladenosine-3'-phosphorothioate
  modified_base 2: mod_base = OTHER; note = 2'-fluorouridine-3'-phosphorothioate
  modified_base 3: mod_base = OTHER; note = 2'-O-methyladenosine-3'-phosphate
  modified_base 4: mod_base = OTHER; note = 2'-fluoroguanosine-3'-phosphate
  modified_base 5: mod_base = OTHER; note = 2'-O-methylcytidine-3'-phosphate
  modified_base 6: mod_base = OTHER; note = 2'-fluorouridine-3'-phosphate
  modified_base 7: mod_base = OTHER; note = 2'-O-methylguanosine-3'-phosphate
  modified_base 8: mod_base = OTHER; note = 2'-fluorocytidine-3'-phosphate
  modified_base 9: mod_base = OTHER; note = 2'-O-methylcytidine-3'-phosphate
  modified_base 10: mod_base = OTHER; note = 2'-fluorouridine-3'-phosphate
  modified_base 11: mod_base = OTHER; note = 2'-O-methylguanosine-3'-phosphate
  modified_base 12: mod_base = OTHER; note = 2'-fluorouridine-3'-phosphate
  modified_base 13: mod_base = OTHER; note = 2'-O-methylcytidine-3'-phosphate
  modified_base 14: mod_base = OTHER; note = 2'-fluorocytidine-3'-phosphate
  modified_base 15: mod_base = OTHER; note = 2'-O-methylcytidine-3'-phosphate
  modified_base 16: mod_base = OTHER; note = 2'-fluoroadenosine-3'-phosphate
  modified_base 17: mod_base = OTHER; note = 2'-O-methylguanosine-3'-phosphate
  modified_base 18: mod_base = OTHER; note = 2'-fluoroguanosine-3'-phosphate
  modified_base 19: mod_base = OTHER; note = 2'-O-methylcytidine-3'-phosphorothioate
  modified_base 20: mod_base = OTHER; note = 2'-O-methylcytidine-3'-phosphorothioate
  modified_base 21: mod_base = OTHER; note = 2'-O-methylcytidine
atagctgcctgtcccaggccc

SEQ ID NO: 1003 - RNA, 21 nt, synthetic construct
  source 1..21: mol_type = other RNA
  modified_base 1: mod_base = OTHER; note = 5'-phosphate-2'-O-methyladenosine-3'-phosphorothioate
  modified_base 2: mod_base = OTHER; note = 2'-fluoroguanosine-3'-phosphorothioate
  modified_base 3: mod_base = OTHER; note = 2'-O-methyladenosine-3'-phosphate
  modified_base 4: mod_base = OTHER; note = 2'-fluoroadenosine-3'-phosphate
  modified_base 5: mod_base = OTHER; note = 2'-O-methylcytidine-3'-phosphate
  modified_base 6: mod_base = OTHER; note = 2'-fluoroadenosine-3'-phosphate
  modified_base 7: mod_base = OTHER; note = 2'-O-methyluridine-3'-phosphate
  modified_base 8: mod_base = OTHER; note = 2'-fluorouridine-3'-phosphate
  modified_base 9: mod_base = OTHER; note = 2'-O-methyluridine-3'-phosphate
  modified_base 10: mod_base = OTHER; note = 2'-fluorocytidine-3'-phosphate
  modified_base 11: mod_base = OTHER; note = 2'-O-methyladenosine-3'-phosphate
  modified_base 12: mod_base = OTHER; note = 2'-fluorouridine-3'-phosphate
  modified_base 13: mod_base = OTHER; note = 2'-O-methyladenosine-3'-phosphate
  modified_base 14: mod_base = OTHER; note = 2'-fluoroguanosine-3'-phosphate
  modified_base 15: mod_base = OTHER; note = 2'-O-methylguanosine-3'-phosphate
  modified_base 16: mod_base = OTHER; note = 2'-fluorocytidine-3'-phosphate
  modified_base 17: mod_base = OTHER; note = 2'-O-methylguanosine-3'-phosphate
  modified_base 18: mod_base = OTHER; note = 2'-fluoroadenosine-3'-phosphate
  modified_base 19: mod_base = OTHER; note = 2'-O-methyladenosine-3'-phosphorothioate
  modified_base 20: mod_base = OTHER; note = 2'-O-methyluridine-3'-phosphorothioate
  modified_base 21: mod_base = OTHER; note = 2'-O-methyladenosine
agaacatttcataggcgaata

SEQ ID NO: 1004 - RNA, 21 nt, synthetic construct
  source 1..21: mol_type = other RNA
  modified_base 1: mod_base = OTHER; note = 5'-phosphate-2'-O-methyluridine-3'-phosphorothioate
  modified_base 2: mod_base = OTHER; note = 2'-fluoroadenosine-3'-phosphorothioate
  modified_base 3: mod_base = OTHER; note = 2'-O-methylguanosine-3'-phosphate
  modified_base 4: mod_base = OTHER; note = 2'-fluoroadenosine-3'-phosphate
  modified_base 5: mod_base = OTHER; note = 2'-O-methyladenosine-3'-phosphate
  modified_base 6: mod_base = OTHER; note = 2'-fluorocytidine-3'-phosphate
  modified_base 7: mod_base = OTHER; note = 2'-O-methyladenosine-3'-phosphate
  modified_base 8: mod_base = OTHER; note = 2'-fluorouridine-3'-phosphate
  modified_base 9: mod_base = OTHER; note = 2'-O-methyluridine-3'-phosphate
  modified_base 10: mod_base = OTHER; note = 2'-fluorouridine-3'-phosphate
  modified_base 11: mod_base = OTHER; note = 2'-O-methylcytidine-3'-phosphate
  modified_base 12: mod_base = OTHER; note = 2'-fluoroadenosine-3'-phosphate
  modified_base 13: mod_base = OTHER; note = 2'-O-methyluridine-3'-phosphate
  modified_base 14: mod_base = OTHER; note = 2'-fluoroadenosine-3'-phosphate
  modified_base 15: mod_base = OTHER; note = 2'-O-methylguanosine-3'-phosphate
  modified_base 16: mod_base = OTHER; note = 2'-fluoroguanosine-3'-phosphate
  modified_base 17: mod_base = OTHER; note = 2'-O-methylcytidine-3'-phosphate
  modified_base 18: mod_base = OTHER; note = 2'-fluoroguanosine-3'-phosphate
  modified_base 19: mod_base = OTHER; note = 2'-O-methyladenosine-3'-phosphorothioate
  modified_base 20: mod_base = OTHER; note = 2'-O-methyladenosine-3'-phosphorothioate
  modified_base 21: mod_base = OTHER; note = 2'-O-methyluridine
tagaacatttcataggcgaat

SEQ ID NO: 1005 - RNA, 21 nt, synthetic construct
  source 1..21: mol_type = other RNA
  modified_base 1: mod_base = OTHER; note = 5'-phosphate-2'-O-methyladenosine-3'-phosphorothioate
  modified_base 2: mod_base = OTHER; note = 2'-fluoroguanosine-3'-phosphorothioate
  modified_base 3: mod_base = OTHER; note = 2'-O-methyluridine-3'-phosphate
  modified_base 4: mod_base = OTHER; note = 2'-fluoroadenosine-3'-phosphate
  modified_base 5: mod_base = OTHER; note = 2'-O-methylguanosine-3'-phosphate
  modified_base 6: mod_base = OTHER; note = 2'-fluoroadenosine-3'-phosphate
  modified_base 7: mod_base = OTHER; note = 2'-O-methyladenosine-3'-phosphate
  modified_base 8: mod_base = OTHER; note = 2'-fluoroguanosine-3'-phosphate
  modified_base 9: mod_base = OTHER; note = 2'-O-methylguanosine-3'-phosphate
  modified_base 10: mod_base = OTHER; note = 2'-fluoroguanosine-3'-phosphate
  modified_base 11: mod_base = OTHER; note = 2'-O-methylcytidine-3'-phosphate
  modified_base 12: mod_base = OTHER; note = 2'-fluoroguanosine-3'-phosphate
  modified_base 13: mod_base = OTHER; note = 2'-O-methyluridine-3'-phosphate
  modified_base 14: mod_base = OTHER; note = 2'-fluorocytidine-3'-phosphate
  modified_base 15: mod_base = OTHER; note = 2'-O-methyluridine-3'-phosphate
  modified_base 16: mod_base = OTHER; note = 2'-fluoroguanosine-3'-phosphate
  modified_base 17: mod_base = OTHER; note = 2'-O-methylcytidine-3'-phosphate
  modified_base 18: mod_base = OTHER; note = 2'-fluorocytidine-3'-phosphate
  modified_base 19: mod_base = OTHER; note = 2'-O-methylcytidine-3'-phosphorothioate
  modified_base 20: mod_base = OTHER; note = 2'-O-methyladenosine-3'-phosphorothioate
  modified_base 21: mod_base = OTHER; note = 2'-O-methyluridine
agtagaagggcgtctgcccat

SEQ ID NO: 1006 - RNA, 21 nt, synthetic construct
  source 1..21: mol_type = other RNA
  modified_base 1: mod_base = OTHER; note = 5'-phosphate-2'-O-methyladenosine-3'-phosphorothioate
  modified_base 2: mod_base = OTHER; note = 2'-fluorouridine-3'-phosphorothioate
  modified_base 3: mod_base = OTHER; note = 2'-O-methylcytidine-3'-phosphate
  modified_base 4: mod_base = OTHER; note = 2'-fluorocytidine-3'-phosphate
  modified_base 5: mod_base = OTHER; note = 2'-O-methylguanosine-3'-phosphate
  modified_base 6: mod_base = OTHER; note = 2'-fluorocytidine-3'-phosphate
  modified_base 7: mod_base = OTHER; note = 2'-O-methylguanosine-3'-phosphate
  modified_base 8: mod_base = OTHER; note = 2'-fluorouridine-3'-phosphate
  modified_base 9: mod_base = OTHER; note = 2'-O-methyladenosine-3'-phosphate
  modified_base 10: mod_base = OTHER; note = 2'-fluoroguanosine-3'-phosphate
  modified_base 11: mod_base = OTHER; note = 2'-O-methyladenosine-3'-phosphate
  modified_base 12: mod_base = OTHER; note = 2'-fluoroadenosine-3'-phosphate
  modified_base 13: mod_base = OTHER; note = 2'-O-methylguanosine-3'-phosphate
  modified_base 14: mod_base = OTHER; note = 2'-fluoroguanosine-3'-phosphate
  modified_base 15: mod_base = OTHER; note = 2'-O-methylguanosine-3'-phosphate
  modified_base 16: mod_base = OTHER; note = 2'-fluorocytidine-3'-phosphate
  modified_base 17: mod_base = OTHER; note = 2'-O-methylguanosine-3'-phosphate
  modified_base 18: mod_base = OTHER; note = 2'-fluorouridine-3'-phosphate
  modified_base 19: mod_base = OTHER; note = 2'-O-methylcytidine-3'-phosphorothioate
  modified_base 20: mod_base = OTHER; note = 2'-O-methyluridine-3'-phosphorothioate
  modified_base 21: mod_base = OTHER; note = 2'-O-methylguanosine
atccgcgtagaagggcgtctg

SEQ ID NO: 1007 - RNA, 21 nt, synthetic construct
  source 1..21: mol_type = other RNA
  modified_base 1: mod_base = OTHER; note = 5'-phosphate-2'-O-methyladenosine-3'-phosphorothioate
  modified_base 2: mod_base = OTHER; note = 2'-fluorouridine-3'-phosphorothioate
  modified_base 3: mod_base = OTHER; note = 2'-O-methylcytidine-3'-phosphate
  modified_base 4: mod_base = OTHER; note = 2'-fluorocytidine-3'-phosphate
  modified_base 5: mod_base = OTHER; note = 2'-O-methylguanosine-3'-phosphate
  modified_base 6: mod_base = OTHER; note = 2'-fluorocytidine-3'-phosphate
  modified_base 7: mod_base = OTHER; note = 2'-O-methylguanosine-3'-phosphate
  modified_base 8: mod_base = OTHER; note = 2'-fluorouridine-3'-phosphate
  modified_base 9: mod_base = OTHER; note = 2'-O-methyladenosine-3'-phosphate
  modified_base 10: mod_base = OTHER; note = 2'-fluoroguanosine-3'-phosphate
  modified_base 11: mod_base = OTHER; note = 2'-O-methyladenosine-3'-phosphate
  modified_base 12: mod_base = OTHER; note = 2'-fluoroadenosine-3'-phosphate
  modified_base 13: mod_base = OTHER; note = 2'-O-methylguanosine-3'-phosphate
  modified_base 14: mod_base = OTHER; note = 2'-fluoroguanosine-3'-phosphate
  modified_base 15: mod_base = OTHER; note = 2'-O-methylguanosine-3'-phosphate
  modified_base 16: mod_base = OTHER; note = 2'-fluorocytidine-3'-phosphate
  modified_base 17: mod_base = OTHER; note = 2'-O-methylguanosine-3'-phosphate
  modified_base 18: mod_base = OTHER; note = 2'-fluorouridine-3'-phosphate
  modified_base 19: mod_base = OTHER; note = 2'-O-methylcytidine-3'-phosphorothioate
  modified_base 20: mod_base = OTHER; note = 2'-O-methyluridine-3'-phosphorothioate
  modified_base 21: mod_base = OTHER; note = 2'-O-methylguanosine
atccgcgtagaagggcgtctg

SEQ ID NO: 1008 - RNA, 21 nt, synthetic construct
  source 1..21: mol_type = other RNA
  modified_base 1: mod_base = OTHER; note = 5'-phosphate-2'-O-methyladenosine-3'-phosphorothioate
  modified_base 2: mod_base = OTHER; note = 2'-fluoroadenosine-3'-phosphorothioate
  modified_base 3: mod_base = OTHER; note = 2'-O-methyladenosine-3'-phosphate
  modified_base 4: mod_base = OTHER; note = 2'-fluorouridine-3'-phosphate
  modified_base 5: mod_base = OTHER; note = 2'-O-methylcytidine-3'-phosphate
  modified_base 6: mod_base = OTHER; note = 2'-fluorocytidine-3'-phosphate
  modified_base 7: mod_base = OTHER; note = 2'-O-methylguanosine-3'-phosphate
  modified_base 8: mod_base = OTHER; note = 2'-fluorocytidine-3'-phosphate
  modified_base 9: mod_base = OTHER; note = 2'-O-methylguanosine-3'-phosphate
  modified_base 10: mod_base = OTHER; note = 2'-fluorouridine-3'-phosphate
  modified_base 11: mod_base = OTHER; note = 2'-O-methyladenosine-3'-phosphate
  modified_base 12: mod_base = OTHER; note = 2'-fluoroguanosine-3'-phosphate
  modified_base 13: mod_base = OTHER; note = 2'-O-methyladenosine-3'-phosphate
  modified_base 14: mod_base = OTHER; note = 2'-fluoroadenosine-3'-phosphate
  modified_base 15: mod_base = OTHER; note = 2'-O-methylguanosine-3'-phosphate
  modified_base 16: mod_base = OTHER; note = 2'-fluoroguanosine-3'-phosphate
  modified_base 17: mod_base = OTHER; note = 2'-O-methylguanosine-3'-phosphate
  modified_base 18: mod_base = OTHER; note = 2'-fluorocytidine-3'-phosphate
  modified_base 19: mod_base = OTHER; note = 2'-O-methylguanosine-3'-phosphorothioate
  modified_base 20: mod_base = OTHER; note = 2'-O-methyluridine-3'-phosphorothioate
  modified_base 21: mod_base = OTHER; note = 2'-O-methylcytidine
aaatccgcgtagaagggcgtc

SEQ ID NO: 1009 - RNA, 21 nt, synthetic construct
  source 1..21: mol_type = other RNA
  modified_base 1: mod_base = OTHER; note = 5'-phosphate-2'-O-methyladenosine-3'-phosphorothioate
  modified_base 2: mod_base = OTHER; note = 2'-fluoroguanosine-3'-phosphorothioate
  modified_base 3: mod_base = OTHER; note = 2'-O-methyladenosine-3'-phosphate
  modified_base 4: mod_base = OTHER; note = 2'-fluoroadenosine-3'-phosphate
  modified_base 5: mod_base = OTHER; note = 2'-O-methyluridine-3'-phosphate
  modified_base 6: mod_base = OTHER; note = 2'-fluorocytidine-3'-phosphate
  modified_base 7: mod_base = OTHER; note = 2'-O-methylcytidine-3'-phosphate
  modified_base 8: mod_base = OTHER; note = 2'-fluoroguanosine-3'-phosphate
  modified_base 9: mod_base = OTHER; note = 2'-O-methylcytidine-3'-phosphate
  modified_base 10: mod_base = OTHER; note = 2'-fluoroguanosine-3'-phosphate
  modified_base 11: mod_base = OTHER; note = 2'-O-methyluridine-3'-phosphate
  modified_base 12: mod_base = OTHER; note = 2'-fluoroadenosine-3'-phosphate
  modified_base 13: mod_base = OTHER; note = 2'-O-methylguanosine-3'-phosphate
  modified_base 14: mod_base = OTHER; note = 2'-fluoroadenosine-3'-phosphate
  modified_base 15: mod_base = OTHER; note = 2'-O-methyladenosine-3'-phosphate
  modified_base 16: mod_base = OTHER; note = 2'-fluoroguanosine-3'-phosphate
  modified_base 17: mod_base = OTHER; note = 2'-O-methylguanosine-3'-phosphate
  modified_base 18: mod_base = OTHER; note = 2'-fluoroguanosine-3'-phosphate
  modified_base 19: mod_base = OTHER; note = 2'-O-methylcytidine-3'-phosphorothioate
  modified_base 20: mod_base = OTHER; note = 2'-O-methylguanosine-3'-phosphorothioate
  modified_base 21: mod_base = OTHER; note = 2'-O-methyluridine
agaatccgcgtagaagggcgt

SEQ ID NO: 1010 - RNA, 21 nt, synthetic construct
  source 1..21: mol_type = other RNA
  modified_base 1: mod_base = OTHER; note = 5'-phosphate-2'-O-methyladenosine-3'-phosphorothioate
  modified_base 2: mod_base = OTHER; note = 2'-fluorouridine-3'-phosphorothioate
  modified_base 3: mod_base = OTHER; note = 2'-O-methylguanosine-3'-phosphate
  modified_base 4: mod_base = OTHER; note = 2'-fluoroguanosine-3'-phosphate
  modified_base 5: mod_base = OTHER; note = 2'-O-methyladenosine-3'-phosphate
  modified_base 6: mod_base = OTHER; note = 2'-fluoroadenosine-3'-phosphate
  modified_base 7: mod_base = OTHER; note = 2'-O-methyluridine-3'-phosphate
  modified_base 8: mod_base = OTHER; note = 2'-fluorocytidine-3'-phosphate
  modified_base 9: mod_base = OTHER; note = 2'-O-methylcytidine-3'-phosphate
  modified_base 10: mod_base = OTHER; note = 2'-fluoroguanosine-3'-phosphate
  modified_base 11: mod_base = OTHER; note = 2'-O-methylcytidine-3'-phosphate
  modified_base 12: mod_base = OTHER; note = 2'-fluoroguanosine-3'-phosphate
  modified_base 13: mod_base = OTHER; note = 2'-O-methyluridine-3'-phosphate
  modified_base 14: mod_base = OTHER; note = 2'-fluoroadenosine-3'-phosphate
  modified_base 15: mod_base = OTHER; note = 2'-O-methylguanosine-3'-phosphate
  modified_base 16: mod_base = OTHER; note = 2'-fluoroadenosine-3'-phosphate
  modified_base 17: mod_base = OTHER; note = 2'-O-methyladenosine-3'-phosphate
  modified_base 18: mod_base = OTHER; note = 2'-fluoroguanosine-3'-phosphate
  modified_base 19: mod_base = OTHER; note = 2'-O-methylguanosine-3'-phosphorothioate
  modified_base 20: mod_base = OTHER; note = 2'-O-methylguanosine-3'-phosphorothioate
  modified_base 21: mod_base = OTHER; note = 2'-O-methylcytidine
atggaatccgcgtagaagggc

SEQ ID NO: 1011 - RNA, 21 nt, synthetic construct
  source 1..21: mol_type = other RNA
  modified_base 1: mod_base = OTHER; note = 5'-phosphate-2'-O-methyladenosine-3'-phosphorothioate
  modified_base 2: mod_base = OTHER; note = 2'-fluorouridine-3'-phosphorothioate
  modified_base 3: mod_base = OTHER; note = 2'-O-methylcytidine-3'-phosphate
  modified_base 4: mod_base = OTHER; note = 2'-fluorouridine-3'-phosphate
  modified_base 5: mod_base = OTHER; note = 2'-O-methylcytidine-3'-phosphate
  modified_base 6: mod_base = OTHER; note = 2'-fluorocytidine-3'-phosphate
  modified_base 7: mod_base = OTHER; note = 2'-O-methylguanosine-3'-phosphate
  modified_base 8: mod_base = OTHER; note = 2'-fluorocytidine-3'-phosphate
  modified_base 9: mod_base = OTHER; note = 2'-O-methylcytidine-3'-phosphate
  modified_base 10: mod_base = OTHER; note = 2'-fluoroguanosine-3'-phosphate
  modified_base 11: mod_base = OTHER; note = 2'-O-methyluridine-3'-phosphate
  modified_base 12: mod_base = OTHER; note = 2'-fluoroguanosine-3'-phosphate
  modified_base 13: mod_base = OTHER; note = 2'-O-methylguanosine-3'-phosphate
  modified_base 14: mod_base = OTHER; note = 2'-fluoroadenosine-3'-phosphate
  modified_base 15: mod_base = OTHER; note = 2'-O-methyladenosine-3'-phosphate
  modified_base 16: mod_base = OTHER; note = 2'-fluorouridine-3'-phosphate
  modified_base 17: mod_base = OTHER; note = 2'-O-methylcytidine-3'-phosphate
  modified_base 18: mod_base = OTHER; note = 2'-fluorocytidine-3'-phosphate
  modified_base 19: mod_base = OTHER; note = 2'-O-methylguanosine-3'-phosphorothioate
  modified_base 20: mod_base = OTHER; note = 2'-O-methylcytidine-3'-phosphorothioate
  modified_base 21: mod_base = OTHER; note = 2'-O-methylguanosine
atctccgccgtggaatccgcg

SEQ ID NO: 1012 - RNA, 21 nt, synthetic construct
  source 1..21: mol_type = other RNA
  modified_base 1: mod_base = OTHER; note = 5'-phosphate-2'-O-methyluridine-3'-phosphorothioate
  modified_base 2: mod_base = OTHER; note = 2'-fluoroadenosine-3'-phosphorothioate
  modified_base 3: mod_base = OTHER; note = 2'-O-methylguanosine-3'-phosphate
  modified_base 4: mod_base = OTHER; note = 2'-fluoroguanosine-3'-phosphate
  modified_base 5: mod_base = OTHER; note = 2'-O-methyluridine-3'-phosphate
  modified_base 6: mod_base = OTHER; note = 2'-fluorocytidine-3'-phosphate
  modified_base 7: mod_base = OTHER; note = 2'-O-methyluridine-3'-phosphate
  modified_base 8: mod_base = OTHER; note = 2'-fluorocytidine-3'-phosphate
  modified_base 9: mod_base = OTHER; note = 2'-O-methylcytidine-3'-phosphate
  modified_base 10: mod_base = OTHER; note = 2'-fluoroguanosine-3'-phosphate
  modified_base 11: mod_base = OTHER; note = 2'-O-methylcytidine-3'-phosphate
  modified_base 12: mod_base = OTHER; note = 2'-fluorocytidine-3'-phosphate
  modified_base 13: mod_base = OTHER; note = 2'-O-methylguanosine-3'-phosphate
  modified_base 14: mod_base = OTHER; note = 2'-fluorouridine-3'-phosphate
  modified_base 15: mod_base = OTHER; note = 2'-O-methylguanosine-3'-phosphate
  modified_base 16: mod_base = OTHER; note = 2'-fluoroguanosine-3'-phosphate
  modified_base 17: mod_base = OTHER; note = 2'-O-methyladenosine-3'-phosphate
  modified_base 18: mod_base = OTHER; note = 2'-fluoroadenosine-3'-phosphate
  modified_base 19: mod_base = OTHER; note = 2'-O-methyluridine-3'-phosphorothioate
  modified_base 20: mod_base = OTHER; note = 2'-O-methylcytidine-3'-phosphorothioate
  modified_base 21: mod_base = OTHER; note = 2'-O-methylcytidine
taggtctccgccgtggaatcc

SEQ ID NO: 1013 - RNA, 21 nt, synthetic construct
  source 1..21: mol_type = other RNA
  modified_base 1: mod_base = OTHER; note = 5'-phosphate-2'-O-methyluridine-3'-phosphorothioate
  modified_base 2: mod_base = OTHER; note = 2'-fluoroguanosine-3'-phosphorothioate
  modified_base 3: mod_base = OTHER; note = 2'-O-methyluridine-3'-phosphate
  modified_base 4: mod_base = OTHER; note = 2'-fluoroadenosine-3'-phosphate
  modified_base 5: mod_base = OTHER; note = 2'-O-methylguanosine-3'-phosphate
  modified_base 6: mod_base = OTHER; note = 2'-fluorouridine-3'-phosphate
  modified_base 7: mod_base = OTHER; note = 2'-O-methylguanosine-3'-phosphate
  modified_base 8: mod_base = OTHER; note = 2'-fluoroguanosine-3'-phosphate
  modified_base 9: mod_base = OTHER; note = 2'-O-methyladenosine-3'-phosphate
  modified_base 10: mod_base = OTHER; note = 2'-fluorocytidine-3'-phosphate
  modified_base 11: mod_base = OTHER; note = 2'-O-methylguanosine-3'-phosphate
  modified_base 12: mod_base = OTHER; note = 2'-fluoroadenosine-3'-phosphate
  modified_base 13: mod_base = OTHER; note = 2'-O-methyluridine-3'-phosphate
  modified_base 14: mod_base = OTHER; note = 2'-fluorocytidine-3'-phosphate
  modified_base 15: mod_base = OTHER; note = 2'-O-methyluridine-3'-phosphate
  modified_base 16: mod_base = OTHER; note = 2'-fluorouridine-3'-phosphate
  modified_base 17: mod_base = OTHER; note = 2'-O-methylguanosine-3'-phosphate
  modified_base 18: mod_base = OTHER; note = 2'-fluorocytidine-3'-phosphate
  modified_base 19: mod_base = OTHER; note = 2'-O-methylcytidine-3'-phosphorothioate
  modified_base 20: mod_base = OTHER; note = 2'-O-methyladenosine-3'-phosphorothioate
  modified_base 21: mod_base = OTHER; note = 2'-O-methyluridine
tgtagtggacgatcttgccat

SEQ ID NO: 1014 - RNA, 21 nt, synthetic construct
  source 1..21: mol_type = other RNA
  modified_base 1: mod_base = OTHER; note = 5'-phosphate-2'-O-methyluridine-3'-phosphorothioate
  modified_base 2: mod_base = OTHER; note = 2'-fluorouridine-3'-phosphorothioate
  modified_base 3: mod_base = OTHER; note = 2'-O-methylguanosine-3'-phosphate
  modified_base 4: mod_base = OTHER; note = 2'-fluorouridine-3'-phosphate
  modified_base 5: mod_base = OTHER; note = 2'-O-methyladenosine-3'-phosphate
  modified_base 6: mod_base = OTHER; note = 2'-fluoroguanosine-3'-phosphate
  modified_base 7: mod_base = OTHER; note = 2'-O-methyluridine-3'-phosphate
  modified_base 8: mod_base = OTHER; note = 2'-fluoroguanosine-3'-phosphate
  modified_base 9: mod_base = OTHER; note = 2'-O-methylguanosine-3'-phosphate
  modified_base 10: mod_base = OTHER; note = 2'-fluoroadenosine-3'-phosphate
  modified_base 11: mod_base = OTHER; note = 2'-O-methylcytidine-3'-phosphate
  modified_base 12: mod_base = OTHER; note = 2'-fluoroguanosine-3'-phosphate
  modified_base 13: mod_base = OTHER; note = 2'-O-methyladenosine-3'-phosphate
  modified_base 14: mod_base = OTHER; note = 2'-fluorouridine-3'-phosphate
  modified_base 15: mod_base = OTHER; note = 2'-O-methylcytidine-3'-phosphate
  modified_base 16: mod_base = OTHER; note = 2'-fluorouridine-3'-phosphate
  modified_base 17: mod_base = OTHER; note = 2'-O-methyluridine-3'-phosphate
  modified_base 18: mod_base = OTHER; note = 2'-fluoroguanosine-3'-phosphate
  modified_base 19: mod_base = OTHER; note = 2'-O-methylcytidine-3'-phosphorothioate
  modified_base 20: mod_base = OTHER; note = 2'-O-methylcytidine-3'-phosphorothioate
  modified_base 21: mod_base = OTHER; note = 2'-O-methyladenosine
ttgtagtggacgatcttgcca

SEQ ID NO: 1015 - RNA, 21 nt, synthetic construct
  source 1..21: mol_type = other RNA
  modified_base 1: mod_base = OTHER; note = 5'-phosphate-2'-O-methylcytidine-3'-phosphorothioate
  modified_base 2: mod_base = OTHER; note = 2'-fluorouridine-3'-phosphorothioate
  modified_base 3: mod_base = OTHER; note = 2'-O-methyluridine-3'-phosphate
  modified_base 4: mod_base = OTHER; note = 2'-fluoroguanosine-3'-phosphate
  modified_base 5: mod_base = OTHER; note = 2'-O-methyluridine-3'-phosphate
  modified_base 6: mod_base = OTHER; note = 2'-fluoroadenosine-3'-phosphate
  modified_base 7: mod_base = OTHER; note = 2'-O-methylguanosine-3'-phosphate
  modified_base 8: mod_base = OTHER; note = 2'-fluorouridine-3'-phosphate
  modified_base 9: mod_base = OTHER; note = 2'-O-methylguanosine-3'-phosphate
  modified_base 10: mod_base = OTHER; note = 2'-fluoroguanosine-3'-phosphate
  modified_base 11: mod_base = OTHER; note = 2'-O-methyladenosine-3'-phosphate
  modified_base 12: mod_base = OTHER; note = 2'-fluorocytidine-3'-phosphate
  modified_base 13: mod_base = OTHER; note = 2'-O-methylguanosine-3'-phosphate
  modified_base 14: mod_base = OTHER; note = 2'-fluoroadenosine-3'-phosphate
  modified_base 15: mod_base = OTHER; note = 2'-O-methyluridine-3'-phosphate
  modified_base 16: mod_base = OTHER; note = 2'-fluorocytidine-3'-phosphate
  modified_base 17: mod_base = OTHER; note = 2'-O-methyluridine-3'-phosphate
  modified_base 18: mod_base = OTHER; note = 2'-fluorouridine-3'-phosphate
  modified_base 19: mod_base = OTHER; note = 2'-O-methylguanosine-3'-phosphorothioate
  modified_base 20: mod_base = OTHER; note = 2'-O-methylcytidine-3'-phosphorothioate
  modified_base 21: mod_base = OTHER; note = 2'-O-methylcytidine
cttgtagtggacgatcttgcc

SEQ ID NO: 1016 - RNA, 21 nt, synthetic construct
  source 1..21: mol_type = other RNA
  modified_base 1: mod_base = OTHER; note = 5'-phosphate-2'-O-methyladenosine-3'-phosphorothioate
  modified_base 2: mod_base = OTHER; note = 2'-fluorouridine-3'-phosphorothioate
  modified_base 3: mod_base = OTHER; note = 2'-O-methylcytidine-3'-phosphate
  modified_base 4: mod_base = OTHER; note = 2'-fluorocytidine-3'-phosphate
  modified_base 5: mod_base = OTHER; note = 2'-O-methyluridine-3'-phosphate
  modified_base 6: mod_base = OTHER; note = 2'-fluorouridine-3'-phosphate
  modified_base 7: mod_base = OTHER; note = 2'-O-methylguanosine-3'-phosphate
  modified_base 8: mod_base = OTHER; note = 2'-fluorouridine-3'-phosphate
  modified_base 9: mod_base = OTHER; note = 2'-O-methyladenosine-3'-phosphate
  modified_base 10: mod_base = OTHER; note = 2'-fluoroguanosine-3'-phosphate
  modified_base 11: mod_base = OTHER; note = 2'-O-methyluridine-3'-phosphate
  modified_base 12: mod_base = OTHER; note = 2'-fluoroguanosine-3'-phosphate
  modified_base 13: mod_base = OTHER; note = 2'-O-methylguanosine-3'-phosphate
  modified_base 14: mod_base = OTHER; note = 2'-fluoroadenosine-3'-phosphate
  modified_base 15: mod_base = OTHER; note = 2'-O-methylcytidine-3'-phosphate
  modified_base 16: mod_base = OTHER; note = 2'-fluoroguanosine-3'-phosphate
  modified_base 17: mod_base = OTHER; note = 2'-O-methyladenosine-3'-phosphate
  modified_base 18: mod_base = OTHER; note = 2'-fluorouridine-3'-phosphate
  modified_base 19: mod_base = OTHER; note = 2'-O-methylcytidine-3'-phosphorothioate
  modified_base 20: mod_base = OTHER; note = 2'-O-methyluridine-3'-phosphorothioate
  modified_base 21: mod_base = OTHER; note = 2'-O-methyluridine
atccttgtagtggacgatctt

SEQ ID NO: 1017 - RNA, 21 nt, synthetic construct
  source 1..21: mol_type = other RNA
  modified_base 1: mod_base = OTHER; note = 5'-phosphate-2'-O-methyladenosine-3'-phosphorothioate
  modified_base 2: mod_base = OTHER; note = 2'-fluorouridine-3'-phosphorothioate
  modified_base 3: mod_base = OTHER; note = 2'-O-methylguanosine-3'-phosphate
  modified_base 4: mod_base = OTHER; note = 2'-fluorocytidine-3'-phosphate
  modified_base 5: mod_base = OTHER; note = 2'-O-methyluridine-3'-phosphate
  modified_base 6: mod_base = OTHER; note = 2'-fluorocytidine-3'-phosphate
  modified_base 7: mod_base = OTHER; note = 2'-O-methylcytidine-3'-phosphate
  modified_base 8: mod_base = OTHER; note = 2'-fluorouridine-3'-phosphate
  modified_base 9: mod_base = OTHER; note = 2'-O-methyluridine-3'-phosphate
  modified_base 10: mod_base = OTHER; note = 2'-fluoroguanosine-3'-phosphate
  modified_base 11: mod_base = OTHER; note = 2'-O-methyluridine-3'-phosphate
  modified_base 12: mod_base = OTHER; note = 2'-fluoroadenosine-3'-phosphate
  modified_base 13: mod_base = OTHER; note = 2'-O-methylguanosine-3'-phosphate
  modified_base 14: mod_base = OTHER; note = 2'-fluorouridine-3'-phosphate
  modified_base 15: mod_base = OTHER; note = 2'-O-methylguanosine-3'-phosphate
  modified_base 16: mod_base = OTHER; note = 2'-fluoroguanosine-3'-phosphate
  modified_base 17: mod_base = OTHER; note = 2'-O-methyladenosine-3'-phosphate
  modified_base 18: mod_base = OTHER; note = 2'-fluorocytidine-3'-phosphate
  modified_base 19: mod_base = OTHER; note = 2'-O-methylguanosine-3'-phosphorothioate
  modified_base 20: mod_base = OTHER; note = 2'-O-methyladenosine-3'-phosphorothioate
  modified_base 21: mod_base = OTHER; note = 2'-O-methyluridine
atgctccttgtagtggacgat

SEQ ID NO: 1018 - RNA, 21 nt, synthetic construct
  source 1..21: mol_type = other RNA
  modified_base 1: mod_base = OTHER; note = 5'-phosphate-2'-O-methyladenosine-3'-phosphorothioate
  modified_base 2: mod_base = OTHER; note = 2'-fluoroadenosine-3'-phosphorothioate
  modified_base 3: mod_base = OTHER; note = 2'-O-methylguanosine-3'-phosphate
  modified_base 4: mod_base = OTHER; note = 2'-fluoroguanosine-3'-phosphate
  modified_base 5: mod_base = OTHER; note = 2'-O-methyluridine-3'-phosphate
  modified_base 6: mod_base = OTHER; note = 2'-fluoroguanosine-3'-phosphate
  modified_base 7: mod_base = OTHER; note = 2'-O-methylcytidine-3'-phosphate
  modified_base 8: mod_base = OTHER; note = 2'-fluorouridine-3'-phosphate
  modified_base 9: mod_base = OTHER; note = 2'-O-methylcytidine-3'-phosphate
  modified_base 10: mod_base = OTHER; note = 2'-fluorocytidine-3'-phosphate
  modified_base 11: mod_base = OTHER; note = 2'-O-methyluridine-3'-phosphate
  modified_base 12: mod_base = OTHER; note = 2'-fluorouridine-3'-phosphate
  modified_base 13: mod_base = OTHER; note = 2'-O-methylguanosine-3'-phosphate
  modified_base 14: mod_base = OTHER; note = 2'-fluorouridine-3'-phosphate
  modified_base 15: mod_base = OTHER; note = 2'-O-methyladenosine-3'-phosphate
  modified_base 16: mod_base = OTHER; note = 2'-fluoroguanosine-3'-phosphate
  modified_base 17: mod_base = OTHER; note = 2'-O-methyluridine-3'-phosphate
  modified_base 18: mod_base = OTHER; note = 2'-fluoroguanosine-3'-phosphate
  modified_base 19: mod_base = OTHER; note = 2'-O-methylguanosine-3'-phosphorothioate
  modified_base 20: mod_base = OTHER; note = 2'-O-methyladenosine-3'-phosphorothioate
  modified_base 21: mod_base = OTHER; note = 2'-O-methylcytidine
aaggtgctccttgtagtggac

SEQ ID NO: 1019 - RNA, 21 nt, synthetic construct
  source 1..21: mol_type = other RNA
  modified_base 1: mod_base = OTHER; note = 5'-phosphate-2'-O-methyladenosine-3'-phosphorothioate
  modified_base 2: mod_base = OTHER; note = 2'-fluoroguanosine-3'-phosphorothioate
  modified_base 3: mod_base = OTHER; note = 2'-O-methyladenosine-3'-phosphate
  modified_base 4: mod_base = OTHER; note = 2'-fluoroguanosine-3'-phosphate
  modified_base 5: mod_base = OTHER; note = 2'-O-methyladenosine-3'-phosphate
  modified_base 6: mod_base = OTHER; note = 2'-fluoroguanosine-3'-phosphate
  modified_base 7: mod_base = OTHER; note = 2'-O-methylguanosine-3'-phosphate
  modified_base 8: mod_base = OTHER; note = 2'-fluorouridine-3'-phosphate
  modified_base 9: mod_base = OTHER; note = 2'-O-methylguanosine-3'-phosphate
  modified_base 10: mod_base = OTHER; note = 2'-fluorocytidine-3'-phosphate
  modified_base 11: mod_base = OTHER; note = 2'-O-methyluridine-3'-phosphate
  modified_base 12: mod_base = OTHER; note = 2'-fluorocytidine-3'-phosphate
  modified_base 13: mod_base = OTHER; note = 2'-O-methylcytidine-3'-phosphate
  modified_base 14: mod_base = OTHER; note = 2'-fluorouridine-3'-phosphate
  modified_base 15: mod_base = OTHER; note = 2'-O-methyluridine-3'-phosphate
  modified_base 16: mod_base = OTHER; note = 2'-fluoroguanosine-3'-phosphate
  modified_base 17: mod_base = OTHER; note = 2'-O-methyluridine-3'-phosphate
  modified_base 18: mod_base = OTHER; note = 2'-fluoroadenosine-3'-phosphate
  modified_base 19: mod_base = OTHER; note = 2'-O-methylguanosine-3'-phosphorothioate
  modified_base 20: mod_base = OTHER; note = 2'-O-methyluridine-3'-phosphorothioate
  modified_base 21: mod_base = OTHER; note = 2'-O-methylguanosine
agagaggtgctccttgtagtg

SEQ ID NO: 1020 - RNA, 21 nt, synthetic construct
  source 1..21: mol_type = other RNA
  modified_base 1: mod_base = OTHER; note = 5'-phosphate-2'-O-methyladenosine-3'-phosphorothioate
  modified_base 2: mod_base = OTHER; note = 2'-fluoroadenosine-3'-phosphorothioate
  modified_base 3: mod_base = OTHER; note = 2'-O-methylguanosine-3'-phosphate
  modified_base 4: mod_base = OTHER; note = 2'-fluoroadenosine-3'-phosphate
  modified_base 5: mod_base = OTHER; note = 2'-O-methylguanosine-3'-phosphate
  modified_base 6: mod_base = OTHER; note = 2'-fluoroadenosine-3'-phosphate
  modified_base 7: mod_base = OTHER; note = 2'-O-methylguanosine-3'-phosphate
  modified_base 8: mod_base = OTHER; note = 2'-fluoroguanosine-3'-phosphate
  modified_base 9: mod_base = OTHER; note = 2'-O-methyluridine-3'-phosphate
  modified_base 10: mod_base = OTHER; note = 2'-fluoroguanosine-3'-phosphate
  modified_base 11: mod_base = OTHER; note = 2'-O-methylcytidine-3'-phosphate
  modified_base 12: mod_base = OTHER; note = 2'-fluorouridine-3'-phosphate
  modified_base 13: mod_base = OTHER; note = 2'-O-methylcytidine-3'-phosphate
  modified_base 14: mod_base = OTHER; note = 2'-fluorocytidine-3'-phosphate
  modified_base 15: mod_base = OTHER; note = 2'-O-methyluridine-3'-phosphate
  modified_base 16: mod_base = OTHER; note = 2'-fluorouridine-3'-phosphate
  modified_base 17: mod_base = OTHER; note = 2'-O-methylguanosine-3'-phosphate
  modified_base 18: mod_base = OTHER; note = 2'-fluorouridine-3'-phosphate
  modified_base 19: mod_base = OTHER; note = 2'-O-methyladenosine-3'-phosphorothioate
  modified_base 20: mod_base = OTHER; note = 2'-O-methylguanosine-3'-phosphorothioate
  modified_base 21: mod_base = OTHER; note = 2'-O-methyluridine
aagagaggtgctccttgtagt

SEQ ID NO: 1021 - RNA, 21 nt, synthetic construct
  source 1..21: mol_type = other RNA
  modified_base 1: mod_base = OTHER; note = 5'-phosphate-2'-O-methyladenosine-3'-phosphorothioate
  modified_base 2: mod_base = OTHER; note = 2'-fluoroadenosine-3'-phosphorothioate
  modified_base 3: mod_base = OTHER; note = 2'-O-methylguanosine-3'-phosphate
  modified_base 4: mod_base = OTHER; note = 2'-fluoroadenosine-3'-phosphate
  modified_base 5: mod_base = OTHER; note = 2'-O-methylguanosine-3'-phosphate
  modified_base 6: mod_base = OTHER; note = 2'-fluoroadenosine-3'-phosphate
  modified_base 7: mod_base = OTHER; note = 2'-O-methylguanosine-3'-phosphate
  modified_base 8: mod_base = OTHER; note = 2'-fluoroadenosine-3'-phosphate
  modified_base 9: mod_base = OTHER; note = 2'-O-methylguanosine-3'-phosphate
  modified_base 10: mod_base = OTHER; note = 2'-fluoroguanosine-3'-phosphate
  modified_base 11: mod_base = OTHER; note = 2'-O-methyluridine-3'-phosphate
  modified_base 12: mod_base = OTHER; note = 2'-fluoroguanosine-3'-phosphate
  modified_base 13: mod_base = OTHER; note = 2'-O-methylcytidine-3'-phosphate
  modified_base 14: mod_base = OTHER; note = 2'-fluorouridine-3'-phosphate
  modified_base 15: mod_base = OTHER; note = 2'-O-methylcytidine-3'-phosphate
  modified_base 16: mod_base = OTHER; note = 2'-fluorocytidine-3'-phosphate
  modified_base 17: mod_base = OTHER; note = 2'-O-methyluridine-3'-phosphate
  modified_base 18: mod_base = OTHER; note = 2'-fluorouridine-3'-phosphate
  modified_base 19: mod_base = OTHER; note = 2'-O-methylguanosine-3'-phosphorothioate
  modified_base 20: mod_base = OTHER; note = 2'-O-methyluridine-3'-phosphorothioate
  modified_base 21: mod_base = OTHER; note = 2'-O-methyladenosine
aagagagaggtgctccttgta

SEQ ID NO: 1022 - RNA, 21 nt, synthetic construct
  source 1..21: mol_type = other RNA
  modified_base 1: mod_base = OTHER; note = 5'-phosphate-2'-O-methyluridine-3'-phosphorothioate
  modified_base 2: mod_base = OTHER; note = 2'-fluoroadenosine-3'-phosphorothioate
  modified_base 3: mod_base = OTHER; note = 2'-O-methyladenosine-3'-phosphate
  modified_base 4: mod_base = OTHER; note = 2'-fluoroguanosine-3'-phosphate
  modified_base 5: mod_base = OTHER; note = 2'-O-methylguanosine-3'-phosphate
  modified_base 6: mod_base = OTHER; note = 2'-fluoroguanosine-3'-phosphate
  modified_base 7: mod_base = OTHER; note = 2'-O-methyladenosine-3'-phosphate
  modified_base 8: mod_base = OTHER; note = 2'-fluorouridine-3'-phosphate
  modified_base 9: mod_base = OTHER; note = 2'-O-methylguanosine-3'-phosphate
  modified_base 10: mod_base = OTHER; note = 2'-fluorouridine-3'-phosphate
  modified_base 11: mod_base = OTHER; note = 2'-O-methylguanosine-3'-phosphate
  modified_base 12: mod_base = OTHER; note = 2'-fluorouridine-3'-phosphate
  modified_base 13: mod_base = OTHER; note = 2'-O-methylcytidine-3'-phosphate
  modified_base 14: mod_base = OTHER; note = 2'-fluorocytidine-3'-phosphate
  modified_base 15: mod_base = OTHER; note = 2'-O-methylguanosine-3'-phosphate
  modified_base 16: mod_base = OTHER; note = 2'-fluoroguanosine-3'-phosphate
  modified_base 17: mod_base = OTHER; note = 2'-O-methyladenosine-3'-phosphate
  modified_base 18: mod_base = OTHER; note = 2'-fluoroadenosine-3'-phosphate
  modified_base 19: mod_base = OTHER; note = 2'-O-methylguanosine-3'-phosphorothioate
  modified_base 20: mod_base = OTHER; note = 2'-O-methyluridine-3'-phosphorothioate
  modified_base 21: mod_base = OTHER; note = 2'-O-methylcytidine
taagggatgtgtccggaagtc

SEQ ID NO: 1023 - RNA, 21 nt, synthetic construct
  source 1..21: mol_type = other RNA
  modified_base 1: mod_base = OTHER; note = 5'-phosphate-2'-O-methyladenosine-3'-phosphorothioate
  modified_base 2: mod_base = OTHER; note = 2'-fluoroadenosine-3'-phosphorothioate
  modified_base 3: mod_base = OTHER; note = 2'-O-methylguanosine-3'-phosphate
  modified_base 4: mod_base = OTHER; note = 2'-fluoroadenosine-3'-phosphate
  modified_base 5: mod_base = OTHER; note = 2'-O-methyladenosine-3'-phosphate
  modified_base 6: mod_base = OTHER; note = 2'-fluoroguanosine-3'-phosphate
  modified_base 7: mod_base = OTHER; note = 2'-O-methylguanosine-3'-phosphate
  modified_base 8: mod_base = OTHER; note = 2'-fluoroguanosine-3'-phosphate
  modified_base 9: mod_base = OTHER; note = 2'-O-methyladenosine-3'-phosphate
  modified_base 10: mod_base = OTHER; note = 2'-fluorouridine-3'-phosphate
  modified_base 11: mod_base = OTHER; note = 2'-O-methylguanosine-3'-phosphate
  modified_base 12: mod_base = OTHER; note = 2'-fluorouridine-3'-phosphate
  modified_base 13: mod_base = OTHER; note = 2'-O-methylguanosine-3'-phosphate
  modified_base 14: mod_base = OTHER; note = 2'-fluorouridine-3'-phosphate
  modified_base 15: mod_base = OTHER; note = 2'-O-methylcytidine-3'-phosphate
  modified_base 16: mod_base = OTHER; note = 2'-fluorocytidine-3'-phosphate
  modified_base 17: mod_base = OTHER; note = 2'-O-methylguanosine-3'-phosphate
  modified_base 18: mod_base = OTHER; note = 2'-fluoroguanosine-3'-phosphate
  modified_base 19: mod_base = OTHER; note = 2'-O-methyladenosine-3'-phosphorothioate
  modified_base 20: mod_base = OTHER; note = 2'-O-methyladenosine-3'-phosphorothioate
  modified_base 21: mod_base = OTHER; note = 2'-O-methylguanosine
aagaagggatgtgtccggaag

SEQ ID NO: 1024 - RNA, 21 nt, synthetic construct
  source 1..21: mol_type = other RNA
  modified_base 1: mod_base = OTHER; note = 5'-phosphate-2'-O-methyluridine-3'-phosphorothioate
  modified_base 2: mod_base = OTHER; note = 2'-fluoroadenosine-3'-phosphorothioate
  modified_base 3: mod_base = OTHER; note = 2'-O-methyladenosine-3'-phosphate
  modified_base 4: mod_base = OTHER; note = 2'-fluoroguanosine-3'-phosphate
  modified_base 5: mod_base = OTHER; note = 2'-O-methyladenosine-3'-phosphate
  modified_base 6: mod_base = OTHER; note = 2'-fluoroadenosine-3'-phosphate
  modified_base 7: mod_base = OTHER; note = 2'-O-methylguanosine-3'-phosphate
  modified_base 8: mod_base = OTHER; note = 2'-fluoroguanosine-3'-phosphate
  modified_base 9: mod_base = OTHER; note = 2'-O-methylguanosine-3'-phosphate
  modified_base 10: mod_base = OTHER; note = 2'-fluoroadenosine-3'-phosphate
  modified_base 11: mod_base = OTHER; note = 2'-O-methyluridine-3'-phosphate
  modified_base 12: mod_base = OTHER; note = 2'-fluoroguanosine-3'-phosphate
  modified_base 13: mod_base = OTHER; note = 2'-O-methyluridine-3'-phosphate
  modified_base 14: mod_base = OTHER; note = 2'-fluoroguanosine-3'-phosphate
  modified_base 15: mod_base = OTHER; note = 2'-O-methyluridine-3'-phosphate
  modified_base 16: mod_base = OTHER; note = 2'-fluorocytidine-3'-phosphate
  modified_base 17: mod_base = OTHER; note = 2'-O-methylcytidine-3'-phosphate
  modified_base 18: mod_base = OTHER; note = 2'-fluoroguanosine-3'-phosphate
  modified_base 19: mod_base = OTHER; note = 2'-O-methylguanosine-3'-phosphorothioate
  modified_base 20: mod_base = OTHER; note = 2'-O-methyladenosine-3'-phosphorothioate
  modified_base 21: mod_base = OTHER; note = 2'-O-methyladenosine
taagaagggatgtgtccggaa

SEQ ID NO: 1025 - RNA, 21 nt, synthetic construct
  source 1..21: mol_type = other RNA
  modified_base 1: mod_base = OTHER; note = 5'-phosphate-2'-O-methyladenosine-3'-phosphorothioate
  modified_base 2: mod_base = OTHER; note = 2'-fluoroadenosine-3'-phosphorothioate
  modified_base 3: mod_base = OTHER; note = 2'-O-methylguanosine-3'-phosphate
  modified_base 4: mod_base = OTHER; note = 2'-fluoroadenosine-3'-phosphate
  modified_base 5: mod_base = OTHER; note = 2'-O-methyladenosine-3'-phosphate
  modified_base 6: mod_base = OTHER; note = 2'-fluoroguanosine-3'-phosphate
  modified_base 7: mod_base = OTHER; note = 2'-O-methyladenosine-3'-phosphate
  modified_base 8: mod_base = OTHER; note = 2'-fluoroadenosine-3'-phosphate
  modified_base 9: mod_base = OTHER; note = 2'-O-methylguanosine-3'-phosphate
  modified_base 10: mod_base = OTHER; note = 2'-fluoroguanosine-3'-phosphate
  modified_base 11: mod_base = OTHER; note = 2'-O-methylguanosine-3'-phosphate
  modified_base 12: mod_base = OTHER; note = 2'-fluoroadenosine-3'-phosphate
  modified_base 13: mod_base = OTHER; note = 2'-O-methyluridine-3'-phosphate
  modified_base 14: mod_base = OTHER; note = 2'-fluoroguanosine-3'-phosphate
  modified_base 15: mod_base = OTHER; note = 2'-O-methyluridine-3'-phosphate
  modified_base 16: mod_base = OTHER; note = 2'-fluoroguanosine-3'-phosphate
  modified_base 17: mod_base = OTHER; note = 2'-O-methyluridine-3'-phosphate
  modified_base 18: mod_base = OTHER; note = 2'-fluorocytidine-3'-phosphate
  modified_base 19: mod_base = OTHER; note = 2'-O-methylcytidine-3'-phosphorothioate
  modified_base 20: mod_base = OTHER; note = 2'-O-methylguanosine-3'-phosphorothioate
  modified_base 21: mod_base = OTHER; note = 2'-O-methylguanosine
aagaagaagggatgtgtccgg

SEQ ID NO: 1026 - RNA, 21 nt, synthetic construct
  source 1..21: mol_type = other RNA
  modified_base 1: mod_base = OTHER; note = 5'-phosphate-2'-O-methyladenosine-3'-phosphorothioate
  modified_base 2: mod_base = OTHER; note = 2'-fluoroadenosine-3'-phosphorothioate
  modified_base 3: mod_base = OTHER; note = 2'-O-methyladenosine-3'-phosphate
  modified_base 4: mod_base = OTHER; note = 2'-fluoroguanosine-3'-phosphate
  modified_base 5: mod_base = OTHER; note = 2'-O-methyladenosine-3'-phosphate
  modified_base 6: mod_base = OTHER; note = 2'-fluoroadenosine-3'-phosphate
  modified_base 7: mod_base = OTHER; note = 2'-O-methylguanosine-3'-phosphate
  modified_base 8: mod_base = OTHER; note = 2'-fluoroadenosine-3'-phosphate
  modified_base 9: mod_base = OTHER; note = 2'-O-methyladenosine-3'-phosphate
  modified_base 10: mod_base = OTHER; note = 2'-fluoroguanosine-3'-phosphate
  modified_base 11: mod_base = OTHER; note = 2'-O-methylguanosine-3'-phosphate
  modified_base 12: mod_base = OTHER; note = 2'-fluoroguanosine-3'-phosphate
  modified_base 13: mod_base = OTHER; note = 2'-O-methyladenosine-3'-phosphate
  modified_base 14: mod_base = OTHER; note = 2'-fluorouridine-3'-phosphate
  modified_base 15: mod_base = OTHER; note = 2'-O-methylguanosine-3'-phosphate
  modified_base 16: mod_base = OTHER; note = 2'-fluorouridine-3'-phosphate
  modified_base 17: mod_base = OTHER; note = 2'-O-methylguanosine-3'-phosphate
  modified_base 18: mod_base = OTHER; note = 2'-fluorouridine-3'-phosphate
  modified_base 19: mod_base = OTHER; note = 2'-O-methylcytidine-3'-phosphorothioate
  modified_base 20: mod_base = OTHER; note = 2'-O-methylcytidine-3'-phosphorothioate
  modified_base 21: mod_base = OTHER; note = 2'-O-methylguanosine
aaagaagaagggatgtgtccg

SEQ ID NO: 1027 - RNA, 21 nt, synthetic construct
  source 1..21: mol_type = other RNA
  modified_base 1: mod_base = OTHER; note = 5'-phosphate-2'-O-methyluridine-3'-phosphorothioate
  modified_base 2: mod_base = OTHER; note = 2'-fluoroadenosine-3'-phosphorothioate
  modified_base 3: mod_base = OTHER; note = 2'-O-methyladenosine-3'-phosphate
  modified_base 4: mod_base = OTHER; note = 2'-fluoroadenosine-3'-phosphate
  modified_base 5: mod_base = OTHER; note = 2'-O-methylguanosine-3'-phosphate
  modified_base 6: mod_base = OTHER; note = 2'-fluoroadenosine-3'-phosphate
  modified_base 7: mod_base = OTHER; note = 2'-O-methyladenosine-3'-phosphate
  modified_base 8: mod_base = OTHER; note = 2'-fluoroguanosine-3'-phosphate
  modified_base 9: mod_base = OTHER; note = 2'-O-methyladenosine-3'-phosphate
  modified_base 10: mod_base = OTHER; note = 2'-fluoroadenosine-3'-phosphate
  modified_base 11: mod_base = OTHER; note = 2'-O-methylguanosine-3'-phosphate
  modified_base 12: mod_base = OTHER; note = 2'-fluoroguanosine-3'-phosphate
  modified_base 13: mod_base = OTHER; note = 2'-O-methylguanosine-3'-phosphate
  modified_base 14: mod_base = OTHER; note = 2'-fluoroadenosine-3'-phosphate
  modified_base 15: mod_base = OTHER; note = 2'-O-methyluridine-3'-phosphate
  modified_base 16: mod_base = OTHER; note = 2'-fluoroguanosine-3'-phosphate
  modified_base 17: mod_base = OTHER; note = 2'-O-methyluridine-3'-phosphate
  modified_base 18: mod_base = OTHER; note = 2'-fluoroguanosine-3'-phosphate
  modified_base 19: mod_base = OTHER; note = 2'-O-methyluridine-3'-phosphorothioate
  modified_base 20: mod_base = OTHER; note = 2'-O-methylcytidine-3'-phosphorothioate
  modified_base 21: mod_base = OTHER; note = 2'-O-methylcytidine
taaagaagaagggatgtgtcc

SEQ ID NO: 1028 - RNA, 21 nt, synthetic construct
  source 1..21: mol_type = other RNA
  modified_base 1: mod_base = OTHER; note = 5'-phosphate-2'-O-methyladenosine-3'-phosphorothioate
  modified_base 2: mod_base = OTHER; note = 2'-fluorocytidine-3'-phosphorothioate
  modified_base 3: mod_base = OTHER; note = 2'-O-methyladenosine-3'-phosphate
  modified_base 4: mod_base = OTHER; note = 2'-fluoroadenosine-3'-phosphate
  modified_base 5: mod_base = OTHER; note = 2'-O-methyladenosine-3'-phosphate
  modified_base 6: mod_base = OTHER; note = 2'-fluoroguanosine-3'-phosphate
  modified_base 7: mod_base = OTHER; note = 2'-O-methyladenosine-3'-phosphate
  modified_base 8: mod_base = OTHER; note = 2'-fluoroadenosine-3'-phosphate
  modified_base 9: mod_base = OTHER; note = 2'-O-methylguanosine-3'-phosphate
  modified_base 10: mod_base = OTHER; note = 2'-fluoroadenosine-3'-phosphate
  modified_base 11: mod_base = OTHER; note = 2'-O-methyladenosine-3'-phosphate
  modified_base 12: mod_base = OTHER; note = 2'-fluoroguanosine-3'-phosphate
  modified_base 13: mod_base = OTHER; note = 2'-O-methylguanosine-3'-phosphate
  modified_base 14: mod_base = OTHER; note = 2'-fluoroguanosine-3'-phosphate
  modified_base 15: mod_base = OTHER; note = 2'-O-methyladenosine-3'-phosphate
  modified_base 16: mod_base = OTHER; note = 2'-fluorouridine-3'-phosphate
  modified_base 17: mod_base = OTHER; note = 2'-O-methylguanosine-3'-phosphate
  modified_base 18: mod_base = OTHER; note = 2'-fluorouridine-3'-phosphate
  modified_base 19: mod_base = OTHER; note = 2'-O-methylguanosine-3'-phosphorothioate
  modified_base 20: mod_base = OTHER; note = 2'-O-methyluridine-3'-phosphorothioate
  modified_base 21: mod_base = OTHER; note = 2'-O-methylcytidine
acaaagaagaagggatgtgtc

SEQ ID NO: 1029 - RNA, 21 nt, synthetic construct
  source 1..21: mol_type = other RNA
  modified_base 1: mod_base = OTHER; note = 5'-phosphate-2'-O-methyladenosine-3'-phosphorothioate
  modified_base 2: mod_base = OTHER; note = 2'-fluoroadenosine-3'-phosphorothioate
  modified_base 3: mod_base = OTHER; note = 2'-O-methylguanosine-3'-phosphate
  modified_base 4: mod_base = OTHER; note = 2'-fluoroguanosine-3'-phosphate
  modified_base 5: mod_base = OTHER; note = 2'-O-methylcytidine-3'-phosphate
  modified_base 6: mod_base = OTHER; note = 2'-fluorocytidine-3'-phosphate
  modified_base 7: mod_base = OTHER; note = 2'-O-methyladenosine-3'-phosphate
  modified_base 8: mod_base = OTHER; note = 2'-fluoroadenosine-3'-phosphate
  modified_base 9: mod_base = OTHER; note = 2'-O-methyladenosine-3'-phosphate
  modified_base 10: mod_base = OTHER; note = 2'-fluoroguanosine-3'-phosphate
  modified_base 11: mod_base = OTHER; note = 2'-O-methyladenosine-3'-phosphate
  modified_base 12: mod_base = OTHER; note = 2'-fluoroadenosine-3'-phosphate
  modified_base 13: mod_base = OTHER; note = 2'-O-methylguanosine-3'-phosphate
  modified_base 14: mod_base = OTHER; note = 2'-fluoroadenosine-3'-phosphate
  modified_base 15: mod_base = OTHER; note = 2'-O-methyladenosine-3'-phosphate
  modified_base 16: mod_base = OTHER; note = 2'-fluoroguanosine-3'-phosphate
  modified_base 17: mod_base = OTHER; note = 2'-O-methylguanosine-3'-phosphate
  modified_base 18: mod_base = OTHER; note = 2'-fluoroguanosine-3'-phosphate
  modified_base 19: mod_base = OTHER; note = 2'-O-methyladenosine-3'-phosphorothioate
  modified_base 20: mod_base = OTHER; note = 2'-O-methyluridine-3'-phosphorothioate
  modified_base 21: mod_base = OTHER; note = 2'-O-methylguanosine
aaggccaaagaagaagggatg

SEQ ID NO: 1030 - RNA, 21 nt, synthetic construct
  source 1..21: mol_type = other RNA
  modified_base 1: mod_base = OTHER; note = 5'-phosphate-2'-O-methyladenosine-3'-phosphorothioate
  modified_base 2: mod_base = OTHER; note = 2'-fluoroguanosine-3'-phosphorothioate
  modified_base 3: mod_base = OTHER; note = 2'-O-methyladenosine-3'-phosphate
  modified_base 4: mod_base = OTHER; note = 2'-fluoroguanosine-3'-phosphate
  modified_base 5: mod_base = OTHER; note = 2'-O-methylguanosine-3'-phosphate
  modified_base 6: mod_base = OTHER; note = 2'-fluorocytidine-3'-phosphate
  modified_base 7: mod_base = OTHER; note = 2'-O-methylcytidine-3'-phosphate
  modified_base 8: mod_base = OTHER; note = 2'-fluoroadenosine-3'-phosphate
  modified_base 9: mod_base = OTHER; note = 2'-O-methyladenosine-3'-phosphate
  modified_base 10: mod_base = OTHER; note = 2'-fluoroadenosine-3'-phosphate
  modified_base 11: mod_base = OTHER; note = 2'-O-methylguanosine-3'-phosphate
  modified_base 12: mod_base = OTHER; note = 2'-fluoroadenosine-3'-phosphate
  modified_base 13: mod_base = OTHER; note = 2'-O-methyladenosine-3'-phosphate
  modified_base 14: mod_base = OTHER; note = 2'-fluoroguanosine-3'-phosphate
  modified_base 15: mod_base = OTHER; note = 2'-O-methyladenosine-3'-phosphate
  modified_base 16: mod_base = OTHER; note = 2'-fluoroadenosine-3'-phosphate
  modified_base 17: mod_base = OTHER; note = 2'-O-methylguanosine-3'-phosphate
  modified_base 18: mod_base = OTHER; note = 2'-fluoroguanosine-3'-phosphate
  modified_base 19: mod_base = OTHER; note = 2'-O-methylguanosine-3'-phosphorothioate
  modified_base 20: mod_base = OTHER; note = 2'-O-methyladenosine-3'-phosphorothioate
  modified_base 21: mod_base = OTHER; note = 2'-O-methyluridine
agaggccaaagaagaagggat

SEQ ID NO: 1031 - RNA, 21 nt, synthetic construct
  source 1..21: mol_type = other RNA
  modified_base 1: mod_base = OTHER; note = 5'-phosphate-2'-O-methyladenosine-3'-phosphorothioate
  modified_base 2: mod_base = OTHER; note = 2'-fluorouridine-3'-phosphorothioate
  modified_base 3: mod_base = OTHER; note = 2'-O-methylcytidine-3'-phosphate
  modified_base 4: mod_base = OTHER; note = 2'-fluoroguanosine-3'-phosphate
  modified_base 5: mod_base = OTHER; note = 2'-O-methyladenosine-3'-phosphate
  modified_base 6: mod_base = OTHER; note = 2'-fluoroguanosine-3'-phosphate
  modified_base 7: mod_base = OTHER; note = 2'-O-methylguanosine-3'-phosphate
  modified_base 8: mod_base = OTHER; note = 2'-fluorocytidine-3'-phosphate
  modified_base 9: mod_base = OTHER; note = 2'-O-methylcytidine-3'-phosphate
  modified_base 10: mod_base = OTHER; note = 2'-fluoroadenosine-3'-phosphate
  modified_base 11: mod_base = OTHER; note = 2'-O-methyladenosine-3'-phosphate
  modified_base 12: mod_base = OTHER; note = 2'-fluoroadenosine-3'-phosphate
  modified_base 13: mod_base = OTHER; note = 2'-O-methylguanosine-3'-phosphate
  modified_base 14: mod_base = OTHER; note = 2'-fluoroadenosine-3'-phosphate
  modified_base 15: mod_base = OTHER; note = 2'-O-methyladenosine-3'-phosphate
  modified_base 16: mod_base = OTHER; note = 2'-fluoroguanosine-3'-phosphate
  modified_base 17: mod_base = OTHER; note = 2'-O-methyladenosine-3'-phosphate
  modified_base 18: mod_base = OTHER; note = 2'-fluoroadenosine-3'-phosphate
  modified_base 19: mod_base = OTHER; note = 2'-O-methylguanosine-3'-phosphorothioate
  modified_base 20: mod_base = OTHER; note = 2'-O-methylguanosine-3'-phosphorothioate
  modified_base 21: mod_base = OTHER; note = 2'-O-methylguanosine
atcgaggccaaagaagaaggg

SEQ ID NO: 1032 - RNA, 21 nt, synthetic construct
  source 1..21: mol_type = other RNA
  modified_base 1: mod_base = OTHER; note = 5'-phosphate-2'-O-methyladenosine-3'-phosphorothioate
  modified_base 2: mod_base = OTHER; note = 2'-fluoroadenosine-3'-phosphorothioate
  modified_base 3: mod_base = OTHER; note = 2'-O-methyluridine-3'-phosphate
  modified_base 4: mod_base = OTHER; note = 2'-fluorocytidine-3'-phosphate
  modified_base 5: mod_base = OTHER; note = 2'-O-methylcytidine-3'-phosphate
  modified_base 6: mod_base = OTHER; note = 2'-fluorocytidine-3'-phosphate
  modified_base 7: mod_base = OTHER; note = 2'-O-methyladenosine-3'-phosphate
  modified_base 8: mod_base = OTHER; note = 2'-fluoroguanosine-3'-phosphate
  modified_base 9: mod_base = OTHER; note = 2'-O-methyluridine-3'-phosphate
  modified_base 10: mod_base = OTHER; note = 2'-fluorocytidine-3'-phosphate
  modified_base 11: mod_base = OTHER; note = 2'-O-methylguanosine-3'-phosphate
  modified_base 12: mod_base = OTHER; note = 2'-fluoroadenosine-3'-phosphate
  modified_base 13: mod_base = OTHER; note = 2'-O-methylguanosine-3'-phosphate
  modified_base 14: mod_base = OTHER; note = 2'-fluoroguanosine-3'-phosphate
  modified_base 15: mod_base = OTHER; note = 2'-O-methylcytidine-3'-phosphate
  modified_base 16: mod_base = OTHER; note = 2'-fluorocytidine-3'-phosphate
  modified_base 17: mod_base = OTHER; note = 2'-O-methyladenosine-3'-phosphate
  modified_base 18: mod_base = OTHER; note = 2'-fluoroadenosine-3'-phosphate
  modified_base 19: mod_base = OTHER; note = 2'-O-methyladenosine-3'-phosphorothioate
  modified_base 20: mod_base = OTHER; note = 2'-O-methylguanosine-3'-phosphorothioate
  modified_base 21: mod_base = OTHER; note = 2'-O-methyladenosine
aatcccagtcgaggccaaaga

SEQ ID NO: 1033 - RNA, 21 nt, synthetic construct
  source 1..21: mol_type = other RNA
  modified_base 1: mod_base = OTHER; note = 5'-phosphate-2'-O-methyladenosine-3'-phosphorothioate
  modified_base 2: mod_base = OTHER; note = 2'-fluoroguanosine-3'-phosphorothioate
  modified_base 3: mod_base = OTHER; note = 2'-O-methyladenosine-3'-phosphate
  modified_base 4: mod_base = OTHER; note = 2'-fluorocytidine-3'-phosphate
  modified_base 5: mod_base = OTHER; note = 2'-O-methylcytidine-3'-phosphate
  modified_base 6: mod_base = OTHER; note = 2'-fluoroadenosine-3'-phosphate
  modified_base 7: mod_base = OTHER; note = 2'-O-methyluridine-3'-phosphate
  modified_base 8: mod_base = OTHER; note = 2'-fluorocytidine-3'-phosphate
  modified_base 9: mod_base = OTHER; note = 2'-O-methylcytidine-3'-phosphate
  modified_base 10: mod_base = OTHER; note = 2'-fluorocytidine-3'-phosphate
  modified_base 11: mod_base = OTHER; note = 2'-O-methyladenosine-3'-phosphate
  modified_base 12: mod_base = OTHER; note = 2'-fluoroguanosine-3'-phosphate
  modified_base 13: mod_base = OTHER; note = 2'-O-methyluridine-3'-phosphate
  modified_base 14: mod_base = OTHER; note = 2'-fluorocytidine-3'-phosphate
  modified_base 15: mod_base = OTHER; note = 2'-O-methylguanosine-3'-phosphate
  modified_base 16: mod_base = OTHER; note = 2'-fluoroadenosine-3'-phosphate
  modified_base 17: mod_base = OTHER; note = 2'-O-methylguanosine-3'-phosphate
  modified_base 18: mod_base = OTHER; note = 2'-fluoroguanosine-3'-phosphate
  modified_base 19: mod_base = OTHER; note = 2'-O-methylcytidine-3'-phosphorothioate
  modified_base 20: mod_base = OTHER; note = 2'-O-methylcytidine-3'-phosphorothioate
  modified_base 21: mod_base = OTHER; note = 2'-O-methyladenosine
agaccatcccagtcgaggcca

SEQ ID NO: 1034 - RNA, 21 nt, synthetic construct
  source 1..21: mol_type = other RNA
  modified_base 1: mod_base = OTHER; note = 5'-phosphate-2'-O-methyladenosine-3'-phosphorothioate
  modified_base 2: mod_base = OTHER; note = 2'-fluoroadenosine-3'-phosphorothioate
  modified_base 3: mod_base = OTHER; note = 2'-O-methylguanosine-3'-phosphate
  modified_base 4: mod_base = OTHER; note = 2'-fluoroadenosine-3'-phosphate
  modified_base 5: mod_base = OTHER; note = 2'-O-methylcytidine-3'-phosphate
  modified_base 6: mod_base = OTHER; note = 2'-fluorocytidine-3'-phosphate
  modified_base 7: mod_base = OTHER; note = 2'-O-methyladenosine-3'-phosphate
  modified_base 8: mod_base = OTHER; note = 2'-fluorouridine-3'-phosphate
  modified_base 9: mod_base = OTHER; note = 2'-O-methylcytidine-3'-phosphate
  modified_base 10: mod_base = OTHER; note = 2'-fluorocytidine-3'-phosphate
  modified_base 11: mod_base = OTHER; note = 2'-O-methylcytidine-3'-phosphate
  modified_base 12: mod_base = OTHER; note = 2'-fluoroadenosine-3'-phosphate
  modified_base 13: mod_base = OTHER; note = 2'-O-methylguanosine-3'-phosphate
  modified_base 14: mod_base = OTHER; note = 2'-fluorouridine-3'-phosphate
  modified_base 15: mod_base = OTHER; note = 2'-O-methylcytidine-3'-phosphate
  modified_base 16: mod_base = OTHER; note = 2'-fluoroguanosine-3'-phosphate
  modified_base 17: mod_base = OTHER; note = 2'-O-methyladenosine-3'-phosphate
  modified_base 18: mod_base = OTHER; note = 2'-fluoroguanosine-3'-phosphate
  modified_base 19: mod_base = OTHER; note = 2'-O-methylguanosine-3'-phosphorothioate
  modified_base 20: mod_base = OTHER; note = 2'-O-methylcytidine-3'-phosphorothioate
  modified_base 21: mod_base = OTHER; note = 2'-O-methylcytidine
aagaccatcccagtcgaggcc

SEQ ID NO: 1035 - RNA, 21 nt, synthetic construct
  source 1..21: mol_type = other RNA
  modified_base 1: mod_base = OTHER; note = 5'-phosphate-2'-O-methyluridine-3'-phosphorothioate
  modified_base 2: mod_base = OTHER; note = 2'-fluorocytidine-3'-phosphorothioate
  modified_base 3: mod_base = OTHER; note = 2'-O-methylguanosine-3'-phosphate
  modified_base 4: mod_base = OTHER; note = 2'-fluoroadenosine-3'-phosphate
  modified_base 5: mod_base = OTHER; note = 2'-O-methyladenosine-3'-phosphate
  modified_base 6: mod_base = OTHER; note = 2'-fluoroadenosine-3'-phosphate
  modified_base 7: mod_base = OTHER; note = 2'-O-methyluridine-3'-phosphate
  modified_base 8: mod_base = OTHER; note = 2'-fluorocytidine-3'-phosphate
  modified_base 9: mod_base = OTHER; note = 2'-O-methylcytidine-3'-phosphate
  modified_base 10: mod_base = OTHER; note = 2'-fluoroguanosine-3'-phosphate
  modified_base 11: mod_base = OTHER; note = 2'-O-methylguanosine-3'-phosphate
  modified_base 12: mod_base = OTHER; note = 2'-fluorouridine-3'-phosphate
  modified_base 13: mod_base = OTHER; note = 2'-O-methylguanosine-3'-phosphate
  modified_base 14: mod_base = OTHER; note = 2'-fluorouridine-3'-phosphate
  modified_base 15: mod_base = OTHER; note = 2'-O-methyladenosine-3'-phosphate
  modified_base 16: mod_base = OTHER; note = 2'-fluoroadenosine-3'-phosphate
  modified_base 17: mod_base = OTHER; note = 2'-O-methyladenosine-3'-phosphate
  modified_base 18: mod_base = OTHER; note = 2'-fluoroguanosine-3'-phosphate
  modified_base 19: mod_base = OTHER; note = 2'-O-methylguanosine-3'-phosphorothioate
  modified_base 20: mod_base = OTHER; note = 2'-O-methylguanosine-3'-phosphorothioate
  modified_base 21: mod_base = OTHER; note = 2'-O-methyluridine
tcgaaatccggtgtaaagggt

SEQ ID NO: 1036 - RNA, 21 nt, synthetic construct
  source 1..21: mol_type = other RNA
  modified_base 1: mod_base = OTHER; note = 5'-phosphate-2'-O-methyluridine-3'-phosphorothioate
  modified_base 2: mod_base = OTHER; note = 2'-fluorouridine-3'-phosphorothioate
  modified_base 3: mod_base = OTHER; note = 2'-O-methylcytidine-3'-phosphate
  modified_base 4: mod_base = OTHER; note = 2'-fluoroguanosine-3'-phosphate
  modified_base 5: mod_base = OTHER; note = 2'-O-methyladenosine-3'-phosphate
  modified_base 6: mod_base = OTHER; note = 2'-fluoroadenosine-3'-phosphate
  modified_base 7: mod_base = OTHER; note = 2'-O-methyladenosine-3'-phosphate
  modified_base 8: mod_base = OTHER; note = 2'-fluorouridine-3'-phosphate
  modified_base 9: mod_base = OTHER; note = 2'-O-methylcytidine-3'-phosphate
  modified_base 10: mod_base = OTHER; note = 2'-fluorocytidine-3'-phosphate
  modified_base 11: mod_base = OTHER; note = 2'-O-methylguanosine-3'-phosphate
  modified_base 12: mod_base = OTHER; note = 2'-fluoroguanosine-3'-phosphate
  modified_base 13: mod_base = OTHER; note = 2'-O-methyluridine-3'-phosphate
  modified_base 14: mod_base = OTHER; note = 2'-fluoroguanosine-3'-phosphate
  modified_base 15: mod_base = OTHER; note = 2'-O-methyluridine-3'-phosphate
  modified_base 16: mod_base = OTHER; note = 2'-fluoroadenosine-3'-phosphate
  modified_base 17: mod_base = OTHER; note = 2'-O-methyladenosine-3'-phosphate
  modified_base 18: mod_base = OTHER; note = 2'-fluoroadenosine-3'-phosphate
  modified_base 19: mod_base = OTHER; note = 2'-O-methylguanosine-3'-phosphorothioate
  modified_base 20: mod_base = OTHER; note = 2'-O-methylguanosine-3'-phosphorothioate
  modified_base 21: mod_base = OTHER; note = 2'-O-methylguanosine
ttcgaaatccggtgtaaaggg

SEQ ID NO: 1037 - RNA, 21 nt, synthetic construct
  source 1..21: mol_type = other RNA
  modified_base 1: mod_base = OTHER; note = 5'-phosphate-2'-O-methyladenosine-3'-phosphorothioate
  modified_base 2: mod_base = OTHER; note = 2'-fluorouridine-3'-phosphorothioate
  modified_base 3: mod_base = OTHER; note = 2'-O-methyluridine-3'-phosphate
  modified_base 4: mod_base = OTHER; note = 2'-fluorocytidine-3'-phosphate
  modified_base 5: mod_base = OTHER; note = 2'-O-methylguanosine-3'-phosphate
  modified_base 6: mod_base = OTHER; note = 2'-fluoroadenosine-3'-phosphate
  modified_base 7: mod_base = OTHER; note = 2'-O-methyladenosine-3'-phosphate
  modified_base 8: mod_base = OTHER; note = 2'-fluoroadenosine-3'-phosphate
  modified_base 9: mod_base = OTHER; note = 2'-O-methyluridine-3'-phosphate
  modified_base 10: mod_base = OTHER; note = 2'-fluorocytidine-3'-phosphate
  modified_base 11: mod_base = OTHER; note = 2'-O-methylcytidine-3'-phosphate
  modified_base 12: mod_base = OTHER; note = 2'-fluoroguanosine-3'-phosphate
  modified_base 13: mod_base = OTHER; note = 2'-O-methylguanosine-3'-phosphate
  modified_base 14: mod_base = OTHER; note = 2'-fluorouridine-3'-phosphate
  modified_base 15: mod_base = OTHER; note = 2'-O-methylguanosine-3'-phosphate
  modified_base 16: mod_base = OTHER; note = 2'-fluorouridine-3'-phosphate
  modified_base 17: mod_base = OTHER; note = 2'-O-methyladenosine-3'-phosphate
  modified_base 18: mod_base = OTHER; note = 2'-fluoroadenosine-3'-phosphate
  modified_base 19: mod_base = OTHER; note = 2'-O-methyladenosine-3'-phosphorothioate
  modified_base 20: mod_base = OTHER; note = 2'-O-methylguanosine-3'-phosphorothioate
  modified_base 21: mod_base = OTHER; note = 2'-O-methylguanosine
attcgaaatccggtgtaaagg

SEQ ID NO: 1038 - RNA, 21 nt, synthetic construct
  source 1..21: mol_type = other RNA
  modified_base 1: mod_base = OTHER; note = 5'-phosphate-2'-O-methyladenosine-3'-phosphorothioate
  modified_base 2: mod_base = OTHER; note = 2'-fluorocytidine-3'-phosphorothioate
  modified_base 3: mod_base = OTHER; note = 2'-O-methyluridine-3'-phosphate
  modified_base 4: mod_base = OTHER; note = 2'-fluorouridine-3'-phosphate
  modified_base 5: mod_base = OTHER; note = 2'-O-methylcytidine-3'-phosphate
  modified_base 6: mod_base = OTHER; note = 2'-fluoroguanosine-3'-phosphate
  modified_base 7: mod_base = OTHER; note = 2'-O-methyladenosine-3'-phosphate
  modified_base 8: mod_base = OTHER; note = 2'-fluoroadenosine-3'-phosphate
  modified_base 9: mod_base = OTHER; note = 2'-O-methyladenosine-3'-phosphate
  modified_base 10: mod_base = OTHER; note = 2'-fluorouridine-3'-phosphate
  modified_base 11: mod_base = OTHER; note = 2'-O-methylcytidine-3'-phosphate
  modified_base 12: mod_base = OTHER; note = 2'-fluorocytidine-3'-phosphate
  modified_base 13: mod_base = OTHER; note = 2'-O-methylguanosine-3'-phosphate
  modified_base 14: mod_base = OTHER; note = 2'-fluoroguanosine-3'-phosphate
  modified_base 15: mod_base = OTHER; note = 2'-O-methyluridine-3'-phosphate
  modified_base 16: mod_base = OTHER; note = 2'-fluoroguanosine-3'-phosphate
  modified_base 17: mod_base = OTHER; note = 2'-O-methyluridine-3'-phosphate
  modified_base 18: mod_base = OTHER; note = 2'-fluoroadenosine-3'-phosphate
  modified_base 19: mod_base = OTHER; note = 2'-O-methyladenosine-3'-phosphorothioate
  modified_base 20: mod_base = OTHER; note = 2'-O-methyladenosine-3'-phosphorothioate
  modified_base 21: mod_base = OTHER; note = 2'-O-methylguanosine
acttcgaaatccggtgtaaag

SEQ ID NO: 1039 - RNA, 21 nt, synthetic construct
  source 1..21: mol_type = other RNA
  modified_base 1: mod_base = OTHER; note = 5'-phosphate-2'-O-methyladenosine-3'-phosphorothioate
  modified_base 2: mod_base = OTHER; note = 2'-fluorocytidine-3'-phosphorothioate
  modified_base 3: mod_base = OTHER; note = 2'-O-methylcytidine-3'-phosphate
  modified_base 4: mod_base = OTHER; note = 2'-fluorouridine-3'-phosphate
  modified_base 5: mod_base = OTHER; note = 2'-O-methyluridine-3'-phosphate
  modified_base 6: mod_base = OTHER; note = 2'-fluorocytidine-3'-phosphate
  modified_base 7: mod_base = OTHER; note = 2'-O-methylguanosine-3'-phosphate
  modified_base 8: mod_base = OTHER; note = 2'-fluoroadenosine-3'-phosphate
  modified_base 9: mod_base = OTHER; note = 2'-O-methyladenosine-3'-phosphate
  modified_base 10: mod_base = OTHER; note = 2'-fluoroadenosine-3'-phosphate
  modified_base 11: mod_base = OTHER; note = 2'-O-methyluridine-3'-phosphate
  modified_base 12: mod_base = OTHER; note = 2'-fluorocytidine-3'-phosphate
  modified_base 13: mod_base = OTHER; note = 2'-O-methylcytidine-3'-phosphate
  modified_base 14: mod_base = OTHER; note = 2'-fluoroguanosine-3'-phosphate
  modified_base 15: mod_base = OTHER; note = 2'-O-methylguanosine-3'-phosphate
  modified_base 16: mod_base = OTHER; note = 2'-fluorouridine-3'-phosphate
  modified_base 17: mod_base = OTHER; note = 2'-O-methylguanosine-3'-phosphate
  modified_base 18: mod_base = OTHER; note = 2'-fluorouridine-3'-phosphate
  modified_base 19: mod_base = OTHER; note = 2'-O-methyladenosine-3'-phosphorothioate
  modified_base 20: mod_base = OTHER; note = 2'-O-methyladenosine-3'-phosphorothioate
  modified_base 21: mod_base = OTHER; note = 2'-O-methyladenosine
accttcgaaatccggtgtaaa

SEQ ID NO: 1040 - RNA, 21 nt, synthetic construct
  source 1..21: mol_type = other RNA
  modified_base 1: mod_base = OTHER; note = 5'-phosphate-2'-O-methyladenosine-3'-phosphorothioate
  modified_base 2: mod_base = OTHER; note = 2'-fluoroadenosine-3'-phosphorothioate
  modified_base 3: mod_base = OTHER; note = 2'-O-methylcytidine-3'-phosphate
  modified_base 4: mod_base = OTHER; note = 2'-fluorocytidine-3'-phosphate
  modified_base 5: mod_base = OTHER; note = 2'-O-methyluridine-3'-phosphate
  modified_base 6: mod_base = OTHER; note = 2'-fluorouridine-3'-phosphate
  modified_base 7: mod_base = OTHER; note = 2'-O-methylcytidine-3'-phosphate
  modified_base 8: mod_base = OTHER; note = 2'-fluoroguanosine-3'-phosphate
  modified_base 9: mod_base = OTHER; note = 2'-O-methyladenosine-3'-phosphate
  modified_base 10: mod_base = OTHER; note = 2'-fluoroadenosine-3'-phosphate
  modified_base 11: mod_base = OTHER; note = 2'-O-methyladenosine-3'-phosphate
  modified_base 12: mod_base = OTHER; note = 2'-fluorouridine-3'-phosphate
  modified_base 13: mod_base = OTHER; note = 2'-O-methylcytidine-3'-phosphate
  modified_base 14: mod_base = OTHER; note = 2'-fluorocytidine-3'-phosphate
  modified_base 15: mod_base = OTHER; note = 2'-O-methylguanosine-3'-phosphate
  modified_base 16: mod_base = OTHER; note = 2'-fluoroguanosine-3'-phosphate
  modified_base 17: mod_base = OTHER; note = 2'-O-methyluridine-3'-phosphate
  modified_base 18: mod_base = OTHER; note = 2'-fluoroguanosine-3'-phosphate
  modified_base 19: mod_base = OTHER; note = 2'-O-methyluridine-3'-phosphorothioate
  modified_base 20: mod_base = OTHER; note = 2'-O-methyladenosine-3'-phosphorothioate
  modified_base 21: mod_base = OTHER; note = 2'-O-methyladenosine
aaccttcgaaatccggtgtaa

SEQ ID NO: 1041 - RNA, 21 nt, synthetic construct
  source 1..21: mol_type = other RNA
  modified_base 1: mod_base = OTHER; note = 5'-phosphate-2'-O-methyladenosine-3'-phosphorothioate
  modified_base 2: mod_base = OTHER; note = 2'-fluorouridine-3'-phosphorothioate
  modified_base 3: mod_base = OTHER; note = 2'-O-methylguanosine-3'-phosphate
  modified_base 4: mod_base = OTHER; note = 2'-fluoroguanosine-3'-phosphate
  modified_base 5: mod_base = OTHER; note = 2'-O-methylcytidine-3'-phosphate
  modified_base 6: mod_base = OTHER; note = 2'-fluoroadenosine-3'-phosphate
  modified_base 7: mod_base = OTHER; note = 2'-O-methylcytidine-3'-phosphate
  modified_base 8: mod_base = OTHER; note = 2'-fluorocytidine-3'-phosphate
  modified_base 9: mod_base = OTHER; note = 2'-O-methyluridine-3'-phosphate
  modified_base 10: mod_base = OTHER; note = 2'-fluorouridine-3'-phosphate
  modified_base 11: mod_base = OTHER; note = 2'-O-methylcytidine-3'-phosphate
  modified_base 12: mod_base = OTHER; note = 2'-fluoroguanosine-3'-phosphate
  modified_base 13: mod_base = OTHER; note = 2'-O-methyladenosine-3'-phosphate
  modified_base 14: mod_base = OTHER; note = 2'-fluoroadenosine-3'-phosphate
  modified_base 15: mod_base = OTHER; note = 2'-O-methyladenosine-3'-phosphate
  modified_base 16: mod_base = OTHER; note = 2'-fluorouridine-3'-phosphate
  modified_base 17: mod_base = OTHER; note = 2'-O-methylcytidine-3'-phosphate
  modified_base 18: mod_base = OTHER; note = 2'-fluorocytidine-3'-phosphate
  modified_base 19: mod_base = OTHER; note = 2'-O-methylguanosine-3'-phosphorothioate
  modified_base 20: mod_base = OTHER; note = 2'-O-methylguanosine-3'-phosphorothioate
  modified_base 21: mod_base = OTHER; note = 2'-O-methyluridine
atggcaccttcgaaatccggt

SEQ ID NO: 1042 - RNA, 21 nt, synthetic construct
  source 1..21: mol_type = other RNA
  modified_base 1: mod_base = OTHER; note = 5'-phosphate-2'-O-methyladenosine-3'-phosphorothioate
  modified_base 2: mod_base = OTHER; note = 2'-fluorouridine-3'-phosphorothioate
  modified_base 3: mod_base = OTHER; note = 2'-O-methylguanosine-3'-phosphate
  modified_base 4: mod_base = OTHER; note = 2'-fluorouridine-3'-phosphate
  modified_base 5: mod_base = OTHER; note = 2'-O-methylcytidine-3'-phosphate
  modified_base 6: mod_base = OTHER; note = 2'-fluoroguanosine-3'-phosphate
  modified_base 7: mod_base = OTHER; note = 2'-O-methylguanosine-3'-phosphate
  modified_base 8: mod_base = OTHER; note = 2'-fluorouridine-3'-phosphate
  modified_base 9: mod_base = OTHER; note = 2'-O-methylguanosine-3'-phosphate
  modified_base 10: mod_base = OTHER; note = 2'-fluoroguanosine-3'-phosphate
  modified_base 11: mod_base = OTHER; note = 2'-O-methylcytidine-3'-phosphate
  modified_base 12: mod_base = OTHER; note = 2'-fluoroadenosine-3'-phosphate
  modified_base 13: mod_base = OTHER; note = 2'-O-methylcytidine-3'-phosphate
  modified_base 14: mod_base = OTHER; note = 2'-fluorocytidine-3'-phosphate
  modified_base 15: mod_base = OTHER; note = 2'-O-methyluridine-3'-phosphate
  modified_base 16: mod_base = OTHER; note = 2'-fluorouridine-3'-phosphate
  modified_base 17: mod_base = OTHER; note = 2'-O-methylcytidine-3'-phosphate
  modified_base 18: mod_base = OTHER; note = 2'-fluoroguanosine-3'-phosphate
  modified_base 19: mod_base = OTHER; note = 2'-O-methyladenosine-3'-phosphorothioate
  modified_base 20: mod_base = OTHER; note = 2'-O-methyladenosine-3'-phosphorothioate
  modified_base 21: mod_base = OTHER; note = 2'-O-methyladenosine
atgtcggtggcaccttcgaaa

SEQ ID NO: 1043 - RNA, 21 nt, synthetic construct
  source 1..21: mol_type = other RNA
  modified_base 1: mod_base = OTHER; note = 5'-phosphate-2'-O-methyladenosine-3'-phosphorothioate
  modified_base 2: mod_base = OTHER; note = 2'-fluorouridine-3'-phosphorothioate
  modified_base 3: mod_base = OTHER; note = 2'-O-methylguanosine-3'-phosphate
  modified_base 4: mod_base = OTHER; note = 2'-fluorouridine-3'-phosphate
  modified_base 5: mod_base = OTHER; note = 2'-O-methylguanosine-3'-phosphate
  modified_base 6: mod_base = OTHER; note = 2'-fluorouridine-3'-phosphate
  modified_base 7: mod_base = OTHER; note = 2'-O-methylcytidine-3'-phosphate
  modified_base 8: mod_base = OTHER; note = 2'-fluoroguanosine-3'-phosphate
  modified_base 9: mod_base = OTHER; note = 2'-O-methylguanosine-3'-phosphate
  modified_base 10: mod_base = OTHER; note = 2'-fluorouridine-3'-phosphate
  modified_base 11: mod_base = OTHER; note = 2'-O-methylguanosine-3'-phosphate
  modified_base 12: mod_base = OTHER; note = 2'-fluoroguanosine-3'-phosphate
  modified_base 13: mod_base = OTHER; note = 2'-O-methylcytidine-3'-phosphate
  modified_base 14: mod_base = OTHER; note = 2'-fluoroadenosine-3'-phosphate
  modified_base 15: mod_base = OTHER; note = 2'-O-methylcytidine-3'-phosphate
  modified_base 16: mod_base = OTHER; note = 2'-fluorocytidine-3'-phosphate
  modified_base 17: mod_base = OTHER; note = 2'-O-methyluridine-3'-phosphate
  modified_base 18: mod_base = OTHER; note = 2'-fluorouridine-3'-phosphate
  modified_base 19: mod_base = OTHER; note = 2'-O-methylcytidine-3'-phosphorothioate
  modified_base 20: mod_base = OTHER; note = 2'-O-methylguanosine-3'-phosphorothioate
  modified_base 21: mod_base = OTHER; note = 2'-O-methyladenosine
atgtgtcggtggcaccttcga

SEQ ID NO: 1044 - RNA, 21 nt, synthetic construct
  source 1..21: mol_type = other RNA
  modified_base 1: mod_base = OTHER; note = 5'-phosphate-2'-O-methyladenosine-3'-phosphorothioate
  modified_base 2: mod_base = OTHER; note = 2'-fluoroadenosine-3'-phosphorothioate
  modified_base 3: mod_base = OTHER; note = 2'-O-methyluridine-3'-phosphate
  modified_base 4: mod_base = OTHER; note = 2'-fluoroguanosine-3'-phosphate
  modified_base 5: mod_base = OTHER; note = 2'-O-methyluridine-3'-phosphate
  modified_base 6: mod_base = OTHER; note = 2'-fluoroguanosine-3'-phosphate
  modified_base 7: mod_base = OTHER; note = 2'-O-methyluridine-3'-phosphate
  modified_base 8: mod_base = OTHER; note = 2'-fluorocytidine-3'-phosphate
  modified_base 9: mod_base = OTHER; note = 2'-O-methylguanosine-3'-phosphate
  modified_base 10: mod_base = OTHER; note = 2'-fluoroguanosine-3'-phosphate
  modified_base 11: mod_base = OTHER; note = 2'-O-methyluridine-3'-phosphate
  modified_base 12: mod_base = OTHER; note = 2'-fluoroguanosine-3'-phosphate
  modified_base 13: mod_base = OTHER; note = 2'-O-methylguanosine-3'-phosphate
  modified_base 14: mod_base = OTHER; note = 2'-fluorocytidine-3'-phosphate
  modified_base 15: mod_base = OTHER; note = 2'-O-methyladenosine-3'-phosphate
  modified_base 16: mod_base = OTHER; note = 2'-fluorocytidine-3'-phosphate
  modified_base 17: mod_base = OTHER; note = 2'-O-methylcytidine-3'-phosphate
  modified_base 18: mod_base = OTHER; note = 2'-fluorouridine-3'-phosphate
  modified_base 19: mod_base = OTHER; note = 2'-O-methyluridine-3'-phosphorothioate
  modified_base 20: mod_base = OTHER; note = 2'-O-methylcytidine-3'-phosphorothioate
  modified_base 21: mod_base = OTHER; note = 2'-O-methylguanosine
aatgtgtcggtggcaccttcg

SEQ ID NO: 1045 - RNA, 21 nt, synthetic construct
  source 1..21: mol_type = other RNA
  modified_base 1: mod_base = OTHER; note = 5'-phosphate-2'-O-methyluridine-3'-phosphorothioate
  modified_base 2: mod_base = OTHER; note = 2'-fluorouridine-3'-phosphorothioate
  modified_base 3: mod_base = OTHER; note = 2'-O-methylguanosine-3'-phosphate
  modified_base 4: mod_base = OTHER; note = 2'-fluorocytidine-3'-phosphate
  modified_base 5: mod_base = OTHER; note = 2'-O-methyladenosine-3'-phosphate
  modified_base 6: mod_base = OTHER; note = 2'-fluorouridine-3'-phosphate
  modified_base 7: mod_base = OTHER; note = 2'-O-methylguanosine-3'-phosphate
  modified_base 8: mod_base = OTHER; note = 2'-fluorouridine-3'-phosphate
  modified_base 9: mod_base = OTHER; note = 2'-O-methylguanosine-3'-phosphate
  modified_base 10: mod_base = OTHER; note = 2'-fluorouridine-3'-phosphate
  modified_base 11: mod_base = OTHER; note = 2'-O-methylcytidine-3'-phosphate
  modified_base 12: mod_base = OTHER; note = 2'-fluoroguanosine-3'-phosphate
  modified_base 13: mod_base = OTHER; note = 2'-O-methylguanosine-3'-phosphate
  modified_base 14: mod_base = OTHER; note = 2'-fluorouridine-3'-phosphate
  modified_base 15: mod_base = OTHER; note = 2'-O-methylguanosine-3'-phosphate
  modified_base 16: mod_base = OTHER; note = 2'-fluoroguanosine-3'-phosphate
  modified_base 17: mod_base = OTHER; note = 2'-O-methylcytidine-3'-phosphate
  modified_base 18: mod_base = OTHER; note = 2'-fluoroadenosine-3'-phosphate
  modified_base 19: mod_base = OTHER; note = 2'-O-methylcytidine-3'-phosphorothioate
  modified_base 20: mod_base = OTHER; note = 2'-O-methylcytidine-3'-phosphorothioate
  modified_base 21: mod_base = OTHER; note = 2'-O-methyluridine
ttgcatgtgtcggtggcacct

SEQ ID NO: 1046 - RNA, 21 nt, synthetic construct
  source 1..21: mol_type = other RNA
  modified_base 1: mod_base = OTHER; note = 5'-phosphate-2'-O-methyladenosine-3'-phosphorothioate
  modified_base 2: mod_base = OTHER; note = 2'-fluorouridine-3'-phosphorothioate
  modified_base 3: mod_base = OTHER; note = 2'-O-methyluridine-3'-phosphate
  modified_base 4: mod_base = OTHER; note = 2'-fluoroguanosine-3'-phosphate
  modified_base 5: mod_base = OTHER; note = 2'-O-methylcytidine-3'-phosphate
  modified_base 6: mod_base = OTHER; note = 2'-fluoroadenosine-3'-phosphate
  modified_base 7: mod_base = OTHER; note = 2'-O-methyluridine-3'-phosphate
  modified_base 8: mod_base = OTHER; note = 2'-fluoroguanosine-3'-phosphate
  modified_base 9: mod_base = OTHER; note = 2'-O-methyluridine-3'-phosphate
  modified_base 10: mod_base = OTHER; note = 2'-fluoroguanosine-3'-phosphate
  modified_base 11: mod_base = OTHER; note = 2'-O-methyluridine-3'-phosphate
  modified_base 12: mod_base = OTHER; note = 2'-fluorocytidine-3'-phosphate
  modified_base 13: mod_base = OTHER; note = 2'-O-methylguanosine-3'-phosphate
  modified_base 14: mod_base = OTHER; note = 2'-fluoroguanosine-3'-phosphate
  modified_base 15: mod_base = OTHER; note = 2'-O-methyluridine-3'-phosphate
  modified_base 16: mod_base = OTHER; note = 2'-fluoroguanosine-3'-phosphate
  modified_base 17: mod_base = OTHER; note = 2'-O-methylguanosine-3'-phosphate
  modified_base 18: mod_base = OTHER; note = 2'-fluorocytidine-3'-phosphate
  modified_base 19: mod_base = OTHER; note = 2'-O-methyladenosine-3'-phosphorothioate
  modified_base 20: mod_base = OTHER; note = 2'-O-methylcytidine-3'-phosphorothioate
  modified_base 21: mod_base = OTHER; note = 2'-O-methylcytidine
attgcatgtgtcggtggcacc

SEQ ID NO: 1047 - RNA, 21 nt, synthetic construct
  source 1..21: mol_type = other RNA
  modified_base 1: mod_base = OTHER; note = 5'-phosphate-2'-O-methyladenosine-3'-phosphorothioate
  modified_base 2: mod_base = OTHER; note = 2'-fluoroadenosine-3'-phosphorothioate
  modified_base 3: mod_base = OTHER; note = 2'-O-methylguanosine-3'-phosphate
  modified_base 4: mod_base = OTHER; note = 2'-fluorouridine-3'-phosphate
  modified_base 5: mod_base = OTHER; note = 2'-O-methyluridine-3'-phosphate
  modified_base 6: mod_base = OTHER; note = 2'-fluoroguanosine-3'-phosphate
  modified_base 7: mod_base = OTHER; note = 2'-O-methylcytidine-3'-phosphate
  modified_base 8: mod_base = OTHER; note = 2'-fluoroadenosine-3'-phosphate
  modified_base 9: mod_base = OTHER; note = 2'-O-methyluridine-3'-phosphate
  modified_base 10: mod_base = OTHER; note = 2'-fluoroguanosine-3'-phosphate
  modified_base 11: mod_base = OTHER; note = 2'-O-methyluridine-3'-phosphate
  modified_base 12: mod_base = OTHER; note = 2'-fluoroguanosine-3'-phosphate
  modified_base 13: mod_base = OTHER; note = 2'-O-methyluridine-3'-phosphate
  modified_base 14: mod_base = OTHER; note = 2'-fluorocytidine-3'-phosphate
  modified_base 15: mod_base = OTHER; note = 2'-O-methylguanosine-3'-phosphate
  modified_base 16: mod_base = OTHER; note = 2'-fluoroguanosine-3'-phosphate
  modified_base 17: mod_base = OTHER; note = 2'-O-methyluridine-3'-phosphate
  modified_base 18: mod_base = OTHER; note = 2'-fluoroguanosine-3'-phosphate
  modified_base 19: mod_base = OTHER; note = 2'-O-methylguanosine-3'-phosphorothioate
  modified_base 20: mod_base = OTHER; note = 2'-O-methylcytidine-3'-phosphorothioate
  modified_base 21: mod_base = OTHER; note = 2'-O-methyladenosine
aagttgcatgtgtcggtggca

SEQ ID NO: 1048 - RNA, 21 nt, synthetic construct
  source 1..21: mol_type = other RNA
  modified_base 1: mod_base = OTHER; note = 5'-phosphate-2'-O-methyladenosine-3'-phosphorothioate
  modified_base 2: mod_base = OTHER; note = 2'-fluoroadenosine-3'-phosphorothioate
  modified_base 3: mod_base = OTHER; note = 2'-O-methyladenosine-3'-phosphate
  modified_base 4: mod_base = OTHER; note = 2'-fluoroguanosine-3'-phosphate
  modified_base 5: mod_base = OTHER; note = 2'-O-methyluridine-3'-phosphate
  modified_base 6: mod_base = OTHER; note = 2'-fluorouridine-3'-phosphate
  modified_base 7: mod_base = OTHER; note = 2'-O-methylguanosine-3'-phosphate
  modified_base 8: mod_base = OTHER; note = 2'-fluorocytidine-3'-phosphate
  modified_base 9: mod_base = OTHER; note = 2'-O-methyladenosine-3'-phosphate
  modified_base 10: mod_base = OTHER; note = 2'-fluorouridine-3'-phosphate
  modified_base 11: mod_base = OTHER; note = 2'-O-methylguanosine-3'-phosphate
  modified_base 12: mod_base = OTHER; note = 2'-fluorouridine-3'-phosphate
  modified_base 13: mod_base = OTHER; note = 2'-O-methylguanosine-3'-phosphate
  modified_base 14: mod_base = OTHER; note = 2'-fluorouridine-3'-phosphate
  modified_base 15: mod_base = OTHER; note = 2'-O-methylcytidine-3'-phosphate
  modified_base 16: mod_base = OTHER; note = 2'-fluoroguanosine-3'-phosphate
  modified_base 17: mod_base = OTHER; note = 2'-O-methylguanosine-3'-phosphate
  modified_base 18: mod_base = OTHER; note = 2'-fluorouridine-3'-phosphate
  modified_base 19: mod_base = OTHER; note = 2'-O-methylguanosine-3'-phosphorothioate
  modified_base 20: mod_base = OTHER; note = 2'-O-methylguanosine-3'-phosphorothioate
  modified_base 21: mod_base = OTHER; note = 2'-O-methylcytidine
aaagttgcatgtgtcggtggc

SEQ ID NO: 1049 - RNA, 21 nt, synthetic construct
  source 1..21: mol_type = other RNA
  modified_base 1: mod_base = OTHER; note = 5'-phosphate-2'-O-methyladenosine-3'-phosphorothioate
  modified_base 2: mod_base = OTHER; note = 2'-fluorouridine-3'-phosphorothioate
  modified_base 3: mod_base = OTHER; note = 2'-O-methylcytidine-3'-phosphate
  modified_base 4: mod_base = OTHER; note = 2'-fluoroguanosine-3'-phosphate
  modified_base 5: mod_base = OTHER; note = 2'-O-methyladenosine-3'-phosphate
  modified_base 6: mod_base = OTHER; note = 2'-fluoroadenosine-3'-phosphate
  modified_base 7: mod_base = OTHER; note = 2'-O-methylguanosine-3'-phosphate
  modified_base 8: mod_base = OTHER; note = 2'-fluorouridine-3'-phosphate
  modified_base 9: mod_base = OTHER; note = 2'-O-methyluridine-3'-phosphate
  modified_base 10: mod_base = OTHER; note = 2'-fluoroguanosine-3'-phosphate
  modified_base 11: mod_base = OTHER; note = 2'-O-methylcytidine-3'-phosphate
  modified_base 12: mod_base = OTHER; note = 2'-fluoroadenosine-3'-phosphate
  modified_base 13: mod_base = OTHER; note = 2'-O-methyluridine-3'-phosphate
  modified_base 14: mod_base = OTHER; note = 2'-fluoroguanosine-3'-phosphate
  modified_base 15: mod_base = OTHER; note = 2'-O-methyluridine-3'-phosphate
  modified_base 16: mod_base = OTHER; note = 2'-fluoroguanosine-3'-phosphate
  modified_base 17: mod_base = OTHER; note = 2'-O-methyluridine-3'-phosphate
  modified_base 18: mod_base = OTHER; note = 2'-fluorocytidine-3'-phosphate
  modified_base 19: mod_base = OTHER; note = 2'-O-methylguanosine-3'-phosphorothioate
  modified_base 20: mod_base = OTHER; note = 2'-O-methylguanosine-3'-phosphorothioate
  modified_base 21: mod_base = OTHER; note = 2'-O-methyluridine
atcgaagttgcatgtgtcggt

SEQ ID NO: 1050 - RNA, 21 nt, synthetic construct
  source 1..21: mol_type = other RNA
  modified_base 1: mod_base = OTHER; note = 5'-phosphate-2'-O-methyladenosine-3'-phosphorothioate
  modified_base 2: mod_base = OTHER; note = 2'-fluoroguanosine-3'-phosphorothioate
  modified_base 3: mod_base = OTHER; note = 2'-O-methyluridine-3'-phosphate
  modified_base 4: mod_base = OTHER; note = 2'-fluorocytidine-3'-phosphate
  modified_base 5: mod_base = OTHER; note = 2'-O-methylguanosine-3'-phosphate
  modified_base 6: mod_base = OTHER; note = 2'-fluoroadenosine-3'-phosphate
  modified_base 7: mod_base = OTHER; note = 2'-O-methyladenosine-3'-phosphate
  modified_base 8: mod_base = OTHER; note = 2'-fluoroguanosine-3'-phosphate
  modified_base 9: mod_base = OTHER; note = 2'-O-methyluridine-3'-phosphate
  modified_base 10: mod_base = OTHER; note = 2'-fluorouridine-3'-phosphate
  modified_base 11: mod_base = OTHER; note = 2'-O-methylguanosine-3'-phosphate
  modified_base 12: mod_base = OTHER; note = 2'-fluorocytidine-3'-phosphate
  modified_base 13: mod_base = OTHER; note = 2'-O-methyladenosine-3'-phosphate
  modified_base 14: mod_base = OTHER; note = 2'-fluorouridine-3'-phosphate
  modified_base 15: mod_base = OTHER; note = 2'-O-methylguanosine-3'-phosphate
  modified_base 16: mod_base = OTHER; note = 2'-fluorouridine-3'-phosphate
  modified_base 17: mod_base = OTHER; note = 2'-O-methylguanosine-3'-phosphate
  modified_base 18: mod_base = OTHER; note = 2'-fluorouridine-3'-phosphate
  modified_base 19: mod_base = OTHER; note = 2'-O-methylcytidine-3'-phosphorothioate
  modified_base 20: mod_base = OTHER; note = 2'-O-methylguanosine-3'-phosphorothioate
  modified_base 21: mod_base = OTHER; note = 2'-O-methylguanosine
agtcgaagttgcatgtgtcgg

SEQ ID NO: 1051 - RNA, 21 nt, synthetic construct
  source 1..21: mol_type = other RNA
  modified_base 1: mod_base = OTHER; note = 5'-phosphate-2'-O-methyladenosine-3'-phosphorothioate
  modified_base 2: mod_base = OTHER; note = 2'-fluoroadenosine-3'-phosphorothioate
  modified_base 3: mod_base = OTHER; note = 2'-O-methylguanosine-3'-phosphate
  modified_base 4: mod_base = OTHER; note = 2'-fluorouridine-3'-phosphate
  modified_base 5: mod_base = OTHER; note = 2'-O-methylcytidine-3'-phosphate
  modified_base 6: mod_base = OTHER; note = 2'-fluoroguanosine-3'-phosphate
  modified_base 7: mod_base = OTHER; note = 2'-O-methyladenosine-3'-phosphate
  modified_base 8: mod_base = OTHER; note = 2'-fluoroadenosine-3'-phosphate
  modified_base 9: mod_base = OTHER; note = 2'-O-methylguanosine-3'-phosphate
  modified_base 10: mod_base = OTHER; note = 2'-fluorouridine-3'-phosphate
  modified_base 11: mod_base = OTHER; note = 2'-O-methyluridine-3'-phosphate
  modified_base 12: mod_base = OTHER; note = 2'-fluoroguanosine-3'-phosphate
  modified_base 13: mod_base = OTHER; note = 2'-O-methylcytidine-3'-phosphate
  modified_base 14: mod_base = OTHER; note = 2'-fluoroadenosine-3'-phosphate
  modified_base 15: mod_base = OTHER; note = 2'-O-methyluridine-3'-phosphate
  modified_base 16: mod_base = OTHER; note = 2'-fluoroguanosine-3'-phosphate
  modified_base 17: mod_base = OTHER; note = 2'-O-methyluridine-3'-phosphate
  modified_base 18: mod_base = OTHER; note = 2'-fluoroguanosine-3'-phosphate
  modified_base 19: mod_base = OTHER; note = 2'-O-methyluridine-3'-phosphorothioate
  modified_base 20: mod_base = OTHER; note = 2'-O-methylcytidine-3'-phosphorothioate
  modified_base 21: mod_base = OTHER; note = 2'-O-methylguanosine
aagtcgaagttgcatgtgtcg

SEQ ID NO: 1052 - RNA, 21 nt, synthetic construct
  source 1..21: mol_type = other RNA
  modified_base 1: mod_base = OTHER; note = 5'-phosphate-2'-O-methyluridine-3'-phosphorothioate
  modified_base 2: mod_base = OTHER; note = 2'-fluoroadenosine-3'-phosphorothioate
  modified_base 3: mod_base = OTHER; note = 2'-O-methyladenosine-3'-phosphate
  modified_base 4: mod_base = OTHER; note = 2'-fluoroguanosine-3'-phosphate
  modified_base 5: mod_base = OTHER; note = 2'-O-methyluridine-3'-phosphate
  modified_base 6: mod_base = OTHER; note = 2'-fluorocytidine-3'-phosphate
  modified_base 7: mod_base = OTHER; note = 2'-O-methylguanosine-3'-phosphate
  modified_base 8: mod_base = OTHER; note = 2'-fluoroadenosine-3'-phosphate
  modified_base 9: mod_base = OTHER; note = 2'-O-methyladenosine-3'-phosphate
  modified_base 10: mod_base = OTHER; note = 2'-fluoroguanosine-3'-phosphate
  modified_base 11: mod_base = OTHER; note = 2'-O-methyluridine-3'-phosphate
  modified_base 12: mod_base = OTHER; note = 2'-fluorouridine-3'-phosphate
  modified_base 13: mod_base = OTHER; note = 2'-O-methylguanosine-3'-phosphate
  modified_base 14: mod_base = OTHER; note = 2'-fluorocytidine-3'-phosphate
  modified_base 15: mod_base = OTHER; note = 2'-O-methyladenosine-3'-phosphate
  modified_base 16: mod_base = OTHER; note = 2'-fluorouridine-3'-phosphate
  modified_base 17: mod_base = OTHER; note = 2'-O-methylguanosine-3'-phosphate
  modified_base 18: mod_base = OTHER; note = 2'-fluorouridine-3'-phosphate
  modified_base 19: mod_base = OTHER; note = 2'-O-methylguanosine-3'-phosphorothioate
  modified_base 20: mod_base = OTHER; note = 2'-O-methyluridine-3'-phosphorothioate
  modified_base 21: mod_base = OTHER; note = 2'-O-methylcytidine
taagtcgaagttgcatgtgtc

SEQ ID NO: 1053 - RNA, 21 nt, synthetic construct
  source 1..21: mol_type = other RNA
  modified_base 1: mod_base = OTHER; note = 5'-phosphate-2'-O-methyladenosine-3'-phosphorothioate
  modified_base 2: mod_base = OTHER; note = 2'-fluorocytidine-3'-phosphorothioate
  modified_base 3: mod_base = OTHER; note = 2'-O-methyladenosine-3'-phosphate
  modified_base 4: mod_base = OTHER; note = 2'-fluoroadenosine-3'-phosphate
  modified_base 5: mod_base = OTHER; note = 2'-O-methylguanosine-3'-phosphate
  modified_base 6: mod_base = OTHER; note = 2'-fluorouridine-3'-phosphate
  modified_base 7: mod_base = OTHER; note = 2'-O-methylcytidine-3'-phosphate
  modified_base 8: mod_base = OTHER; note = 2'-fluoroguanosine-3'-phosphate
  modified_base 9: mod_base = OTHER; note = 2'-O-methyladenosine-3'-phosphate
  modified_base 10: mod_base = OTHER; note = 2'-fluoroadenosine-3'-phosphate
  modified_base 11: mod_base = OTHER; note = 2'-O-methylguanosine-3'-phosphate
  modified_base 12: mod_base = OTHER; note = 2'-fluorouridine-3'-phosphate
  modified_base 13: mod_base = OTHER; note = 2'-O-methyluridine-3'-phosphate
  modified_base 14: mod_base = OTHER; note = 2'-fluoroguanosine-3'-phosphate
  modified_base 15: mod_base = OTHER; note = 2'-O-methylcytidine-3'-phosphate
  modified_base 16: mod_base = OTHER; note = 2'-fluoroadenosine-3'-phosphate
  modified_base 17: mod_base = OTHER; note = 2'-O-methyluridine-3'-phosphate
  modified_base 18: mod_base = OTHER; note = 2'-fluoroguanosine-3'-phosphate
  modified_base 19: mod_base = OTHER; note = 2'-O-methyluridine-3'-phosphorothioate
  modified_base 20: mod_base = OTHER; note = 2'-O-methylguanosine-3'-phosphorothioate
  modified_base 21: mod_base = OTHER; note = 2'-O-methyluridine
acaagtcgaagttgcatgtgt

SEQ ID NO: 1054 - RNA, 21 nt, synthetic construct
  source 1..21: mol_type = other RNA
  modified_base 1: mod_base = OTHER; note = 5'-phosphate-2'-O-methyladenosine-3'-phosphorothioate
  modified_base 2: mod_base = OTHER; note = 2'-fluoroadenosine-3'-phosphorothioate
  modified_base 3: mod_base = OTHER; note = 2'-O-methylcytidine-3'-phosphate
  modified_base 4: mod_base = OTHER; note = 2'-fluorocytidine-3'-phosphate
  modified_base 5: mod_base = OTHER; note = 2'-O-methyladenosine-3'-phosphate
  modified_base 6: mod_base = OTHER; note = 2'-fluoroadenosine-3'-phosphate
  modified_base 7: mod_base = OTHER; note = 2'-O-methylguanosine-3'-phosphate
  modified_base 8: mod_base = OTHER; note = 2'-fluorouridine-3'-phosphate
  modified_base 9: mod_base = OTHER; note = 2'-O-methylcytidine-3'-phosphate
  modified_base 10: mod_base = OTHER; note = 2'-fluoroguanosine-3'-phosphate
  modified_base 11: mod_base = OTHER; note = 2'-O-methyladenosine-3'-phosphate
  modified_base 12: mod_base = OTHER; note = 2'-fluoroadenosine-3'-phosphate
  modified_base 13: mod_base = OTHER; note = 2'-O-methylguanosine-3'-phosphate
  modified_base 14: mod_base = OTHER; note = 2'-fluorouridine-3'-phosphate
  modified_base 15: mod_base = OTHER; note = 2'-O-methyluridine-3'-phosphate
  modified_base 16: mod_base = OTHER; note = 2'-fluoroguanosine-3'-phosphate
  modified_base 17: mod_base = OTHER; note = 2'-O-methylcytidine-3'-phosphate
  modified_base 18: mod_base = OTHER; note = 2'-fluoroadenosine-3'-phosphate
  modified_base 19: mod_base = OTHER; note = 2'-O-methyluridine-3'-phosphorothioate
  modified_base 20: mod_base = OTHER; note = 2'-O-methylguanosine-3'-phosphorothioate
  modified_base 21: mod_base = OTHER; note = 2'-O-methyluridine
aaccaagtcgaagttgcatgt

SEQ ID NO: 1055 - RNA, 21 nt, synthetic construct
  source 1..21: mol_type = other RNA
  modified_base 1: mod_base = OTHER; note = 5'-phosphate-2'-O-methyladenosine-3'-phosphorothioate
  modified_base 2: mod_base = OTHER; note = 2'-fluorouridine-3'-phosphorothioate
  modified_base 3: mod_base = OTHER; note = 2'-O-methylcytidine-3'-phosphate
  modified_base 4: mod_base = OTHER; note = 2'-fluorocytidine-3'-phosphate
  modified_base 5: mod_base = OTHER; note = 2'-O-methyladenosine-3'-phosphate
  modified_base 6: mod_base = OTHER; note = 2'-fluorocytidine-3'-phosphate
  modified_base 7: mod_base = OTHER; note = 2'-O-methylcytidine-3'-phosphate
  modified_base 8: mod_base = OTHER; note = 2'-fluoroadenosine-3'-phosphate
  modified_base 9: mod_base = OTHER; note = 2'-O-methyladenosine-3'-phosphate
  modified_base 10: mod_base = OTHER; note = 2'-fluoroguanosine-3'-phosphate
  modified_base 11: mod_base = OTHER; note = 2'-O-methyluridine-3'-phosphate
  modified_base 12: mod_base = OTHER; note = 2'-fluorocytidine-3'-phosphate
  modified_base 13: mod_base = OTHER; note = 2'-O-methylguanosine-3'-phosphate
  modified_base 14: mod_base = OTHER; note = 2'-fluoroadenosine-3'-phosphate
  modified_base 15: mod_base = OTHER; note = 2'-O-methyladenosine-3'-phosphate
  modified_base 16: mod_base = OTHER; note = 2'-fluoroguanosine-3'-phosphate
  modified_base 17: mod_base = OTHER; note = 2'-O-methyluridine-3'-phosphate
  modified_base 18: mod_base = OTHER; note = 2'-fluorouridine-3'-phosphate
  modified_base 19: mod_base = OTHER; note = 2'-O-methylguanosine-3'-phosphorothioate
  modified_base 20: mod_base = OTHER; note = 2'-O-methylcytidine-3'-phosphorothioate
  modified_base 21: mod_base = OTHER; note = 2'-O-methyladenosine
atccaccaagtcgaagttgca

SEQ ID NO: 1056 - RNA, 21 nt, synthetic construct
  source 1..21: mol_type = other RNA
  modified_base 1: mod_base = OTHER; note = 5'-phosphate-2'-O-methylguanosine-3'-phosphorothioate
  modified_base 2: mod_base = OTHER; note = 2'-fluorouridine-3'-phosphorothioate
  modified_base 3: mod_base = OTHER; note = 2'-O-methylcytidine-3'-phosphate
  modified_base 4: mod_base = OTHER; note = 2'-fluorocytidine-3'-phosphate
  modified_base 5: mod_base = OTHER; note = 2'-O-methyluridine-3'-phosphate
  modified_base 6: mod_base = OTHER; note = 2'-fluorocytidine-3'-phosphate
  modified_base 7: mod_base = OTHER; note = 2'-O-methylcytidine-3'-phosphate
  modified_base 8: mod_base = OTHER; note = 2'-fluoroadenosine-3'-phosphate
  modified_base 9: mod_base = OTHER; note = 2'-O-methylcytidine-3'-phosphate
  modified_base 10: mod_base = OTHER; note = 2'-fluorocytidine-3'-phosphate
  modified_base 11: mod_base = OTHER; note = 2'-O-methyladenosine-3'-phosphate
  modified_base 12: mod_base = OTHER; note = 2'-fluoroadenosine-3'-phosphate
  modified_base 13: mod_base = OTHER; note = 2'-O-methylguanosine-3'-phosphate
  modified_base 14: mod_base = OTHER; note = 2'-fluorouridine-3'-phosphate
  modified_base 15: mod_base = OTHER; note = 2'-O-methylcytidine-3'-phosphate
  modified_base 16: mod_base = OTHER; note = 2'-fluoroguanosine-3'-phosphate
  modified_base 17: mod_base = OTHER; note = 2'-O-methyladenosine-3'-phosphate
  modified_base 18: mod_base = OTHER; note = 2'-fluoroadenosine-3'-phosphate
  modified_base 19: mod_base = OTHER; note = 2'-O-methylguanosine-3'-phosphorothioate
  modified_base 20: mod_base = OTHER; note = 2'-O-methyluridine-3'-phosphorothioate
  modified_base 21: mod_base = OTHER; note = 2'-O-methyluridine
gtcctccaccaagtcgaagtt

SEQ ID NO: 1057 - RNA, 21 nt, synthetic construct
  source 1..21: mol_type = other RNA
  modified_base 1: mod_base = OTHER; note = 5'-phosphate-2'-O-methyladenosine-3'-phosphorothioate
  modified_base 2: mod_base = OTHER; note = 2'-fluorouridine-3'-phosphorothioate
  modified_base 3: mod_base = OTHER; note = 2'-O-methyluridine-3'-phosphate
  modified_base 4: mod_base = OTHER; note = 2'-fluorocytidine-3'-phosphate
  modified_base 5: mod_base = OTHER; note = 2'-O-methylcytidine-3'-phosphate
  modified_base 6: mod_base = OTHER; note = 2'-fluorocytidine-3'-phosphate
  modified_base 7: mod_base = OTHER; note = 2'-O-methylguanosine-3'-phosphate
  modified_base 8: mod_base = OTHER; note = 2'-fluoroadenosine-3'-phosphate
  modified_base 9: mod_base = OTHER; note = 2'-O-methyladenosine-3'-phosphate
  modified_base 10: mod_base = OTHER; note = 2'-fluorouridine-3'-phosphate
  modified_base 11: mod_base = OTHER; note = 2'-O-methylguanosine-3'-phosphate
  modified_base 12: mod_base = OTHER; note = 2'-fluorouridine-3'-phosphate
  modified_base 13: mod_base = OTHER; note = 2'-O-methylcytidine-3'-phosphate
  modified_base 14: mod_base = OTHER; note = 2'-fluorocytidine-3'-phosphate
  modified_base 15: mod_base = OTHER; note = 2'-O-methylguanosine-3'-phosphate
  modified_base 16: mod_base = OTHER; note = 2'-fluoroadenosine-3'-phosphate
  modified_base 17: mod_base = OTHER; note = 2'-O-methylcytidine-3'-phosphate
  modified_base 18: mod_base = OTHER; note = 2'-fluoroadenosine-3'-phosphate
  modified_base 19: mod_base = OTHER; note = 2'-O-methylguanosine-3'-phosphorothioate
  modified_base 20: mod_base = OTHER; note = 2'-O-methyluridine-3'-phosphorothioate
  modified_base 21: mod_base = OTHER; note = 2'-O-methylguanosine
attcccgaatgtccgacagtg

SEQ ID NO: 1058 - RNA, 21 nt, synthetic construct
  source 1..21: mol_type = other RNA
  modified_base 1: mod_base = OTHER; note = 5'-phosphate-2'-O-methylguanosine-3'-phosphorothioate
  modified_base 2: mod_base = OTHER; note = 2'-fluorocytidine-3'-phosphorothioate
  modified_base 3: mod_base = OTHER; note = 2'-O-methyladenosine-3'-phosphate
  modified_base 4: mod_base = OTHER; note = 2'-fluorocytidine-3'-phosphate
  modified_base 5: mod_base = OTHER; note = 2'-O-methylcytidine-3'-phosphate
  modified_base 6: mod_base = OTHER; note = 2'-fluorouridine-3'-phosphate
  modified_base 7: mod_base = OTHER; note = 2'-O-methyluridine-3'-phosphate
  modified_base 8: mod_base = OTHER; note = 2'-fluorocytidine-3'-phosphate
  modified_base 9: mod_base = OTHER; note = 2'-O-methylcytidine-3'-phosphate
  modified_base 10: mod_base = OTHER; note = 2'-fluorocytidine-3'-phosphate
  modified_base 11: mod_base = OTHER; note = 2'-O-methylguanosine-3'-phosphate
  modified_base 12: mod_base = OTHER; note = 2'-fluoroadenosine-3'-phosphate
  modified_base 13: mod_base = OTHER; note = 2'-O-methyladenosine-3'-phosphate
  modified_base 14: mod_base = OTHER; note = 2'-fluorouridine-3'-phosphate
  modified_base 15: mod_base = OTHER; note = 2'-O-methylguanosine-3'-phosphate
  modified_base 16: mod_base = OTHER; note = 2'-fluorouridine-3'-phosphate
  modified_base 17: mod_base = OTHER; note = 2'-O-methylcytidine-3'-phosphate
  modified_base 18: mod_base = OTHER; note = 2'-fluorocytidine-3'-phosphate
  modified_base 19: mod_base = OTHER; note = 2'-O-methylguanosine-3'-phosphorothioate
  modified_base 20: mod_base = OTHER; note = 2'-O-methyladenosine-3'-phosphorothioate
  modified_base 21: mod_base = OTHER; note = 2'-O-methylcytidine
gcaccttcccgaatgtccgac

SEQ ID NO: 1059 - RNA, 21 nt, synthetic construct
  source 1..21: mol_type = other RNA
  modified_base 1: mod_base = OTHER; note = 5'-phosphate-2'-O-methyladenosine-3'-phosphorothioate
  modified_base 2: mod_base = OTHER; note = 2'-fluorouridine-3'-phosphorothioate
  modified_base 3: mod_base = OTHER; note = 2'-O-methylguanosine-3'-phosphate
  modified_base 4: mod_base = OTHER; note = 2'-fluorocytidine-3'-phosphate
  modified_base 5: mod_base = OTHER; note = 2'-O-methyladenosine-3'-phosphate
  modified_base 6: mod_base = OTHER; note = 2'-fluoroguanosine-3'-phosphate
  modified_base 7: mod_base = OTHER; note = 2'-O-methylguanosine-3'-phosphate
  modified_base 8: mod_base = OTHER; note = 2'-fluoroadenosine-3'-phosphate
  modified_base 9: mod_base = OTHER; note = 2'-O-methylguanosine-3'-phosphate
  modified_base 10: mod_base = OTHER; note = 2'-fluorouridine-3'-phosphate
  modified_base 11: mod_base = OTHER; note = 2'-O-methyladenosine-3'-phosphate
  modified_base 12: mod_base = OTHER; note = 2'-fluoroguanosine-3'-phosphate
  modified_base 13: mod_base = OTHER; note = 2'-O-methylguanosine-3'-phosphate
  modified_base 14: mod_base = OTHER; note = 2'-fluoroadenosine-3'-phosphate
  modified_base 15: mod_base = OTHER; note = 2'-O-methylguanosine-3'-phosphate
  modified_base 16: mod_base = OTHER; note = 2'-fluorouridine-3'-phosphate
  modified_base 17: mod_base = OTHER; note = 2'-O-methyladenosine-3'-phosphate
  modified_base 18: mod_base = OTHER; note = 2'-fluoroguanosine-3'-phosphate
  modified_base 19: mod_base = OTHER; note = 2'-O-methylcytidine-3'-phosphorothioate
  modified_base 20: mod_base = OTHER; note = 2'-O-methylcytidine-3'-phosphorothioate
  modified_base 21: mod_base = OTHER; note = 2'-O-methylcytidine
atgcaggagtaggagtagccc

SEQ ID NO: 1060 - RNA, 21 nt, synthetic construct
  source 1..21: mol_type = other RNA
  modified_base 1: mod_base = OTHER; note = 5'-phosphate-2'-O-methyladenosine-3'-phosphorothioate
  modified_base 2: mod_base = OTHER; note = 2'-fluoroadenosine-3'-phosphorothioate
  modified_base 3: mod_base = OTHER; note = 2'-O-methyluridine-3'-phosphate
  modified_base 4: mod_base = OTHER; note = 2'-fluoroguanosine-3'-phosphate
  modified_base 5: mod_base = OTHER; note = 2'-O-methylcytidine-3'-phosphate
  modified_base 6: mod_base = OTHER; note = 2'-fluoroadenosine-3'-phosphate
  modified_base 7: mod_base = OTHER; note = 2'-O-methylguanosine-3'-phosphate
  modified_base 8: mod_base = OTHER; note = 2'-fluoroguanosine-3'-phosphate
  modified_base 9: mod_base = OTHER; note = 2'-O-methyladenosine-3'-phosphate
  modified_base 10: mod_base = OTHER; note = 2'-fluoroguanosine-3'-phosphate
  modified_base 11: mod_base = OTHER; note = 2'-O-methyluridine-3'-phosphate
  modified_base 12: mod_base = OTHER; note = 2'-fluoroadenosine-3'-phosphate
  modified_base 13: mod_base = OTHER; note = 2'-O-methylguanosine-3'-phosphate
  modified_base 14: mod_base = OTHER; note = 2'-fluoroguanosine-3'-phosphate
  modified_base 15: mod_base = OTHER; note = 2'-O-methyladenosine-3'-phosphate
  modified_base 16: mod_base = OTHER; note = 2'-fluoroguanosine-3'-phosphate
  modified_base 17: mod_base = OTHER; note = 2'-O-methyluridine-3'-phosphate
  modified_base 18: mod_base = OTHER; note = 2'-fluoroadenosine-3'-phosphate
  modified_base 19: mod_base = OTHER; note = 2'-O-methylguanosine-3'-phosphorothioate
  modified_base 20: mod_base = OTHER; note = 2'-O-methylcytidine-3'-phosphorothioate
  modified_base 21: mod_base = OTHER; note = 2'-O-methylcytidine
aatgcaggagtaggagtagcc

SEQ ID NO: 1061 - RNA, 21 nt, synthetic construct
  source 1..21: mol_type = other RNA
  modified_base 1: mod_base = OTHER; note = 5'-phosphate-2'-O-methyladenosine-3'-phosphorothioate
  modified_base 2: mod_base = OTHER; note = 2'-fluorouridine-3'-phosphorothioate
  modified_base 3: mod_base = OTHER; note = 2'-O-methylcytidine-3'-phosphate
  modified_base 4: mod_base = OTHER; note = 2'-fluorocytidine-3'-phosphate
  modified_base 5: mod_base = OTHER; note = 2'-O-methyladenosine-3'-phosphate
  modified_base 6: mod_base = OTHER; note = 2'-fluoroguanosine-3'-phosphate
  modified_base 7: mod_base = OTHER; note = 2'-O-methyluridine-3'-phosphate
  modified_base 8: mod_base = OTHER; note = 2'-fluorouridine-3'-phosphate
  modified_base 9: mod_base = OTHER; note = 2'-O-methylcytidine-3'-phosphate
  modified_base 10: mod_base = OTHER; note = 2'-fluorocytidine-3'-phosphate
  modified_base 11: mod_base = OTHER; note = 2'-O-methyladenosine-3'-phosphate
  modified_base 12: mod_base = OTHER; note = 2'-fluorouridine-3'-phosphate
  modified_base 13: mod_base = OTHER; note = 2'-O-methylguanosine-3'-phosphate
  modified_base 14: mod_base = OTHER; note = 2'-fluoroguanosine-3'-phosphate
  modified_base 15: mod_base = OTHER; note = 2'-O-methylguanosine-3'-phosphate
  modified_base 16: mod_base = OTHER; note = 2'-fluorouridine-3'-phosphate
  modified_base 17: mod_base = OTHER; note = 2'-O-methylguanosine-3'-phosphate
  modified_base 18: mod_base = OTHER; note = 2'-fluorouridine-3'-phosphate
  modified_base 19: mod_base = OTHER; note = 2'-O-methylguanosine-3'-phosphorothioate
  modified_base 20: mod_base = OTHER; note = 2'-O-methylguanosine-3'-phosphorothioate
  modified_base 21: mod_base = OTHER; note = 2'-O-methylguanosine
atccagttccatgggtgtggg

SEQ ID NO: 1062 - RNA, 21 nt, synthetic construct
  source 1..21: mol_type = other RNA
  modified_base 1: mod_base = OTHER; note = 5'-phosphate-2'-O-methyladenosine-3'-phosphorothioate
  modified_base 2: mod_base = OTHER; note = 2'-fluorouridine-3'-phosphorothioate
  modified_base 3: mod_base = OTHER; note = 2'-O-methylcytidine-3'-phosphate
  modified_base 4: mod_base = OTHER; note = 2'-fluoroguanosine-3'-phosphate
  modified_base 5: mod_base = OTHER; note = 2'-O-methylguanosine-3'-phosphate
  modified_base 6: mod_base = OTHER; note = 2'-fluorocytidine-3'-phosphate
  modified_base 7: mod_base = OTHER; note = 2'-O-methylcytidine-3'-phosphate
  modified_base 8: mod_base = OTHER; note = 2'-fluorouridine-3'-phosphate
  modified_base 9: mod_base = OTHER; note = 2'-O-methylcytidine-3'-phosphate
  modified_base 10: mod_base = OTHER; note = 2'-fluorocytidine-3'-phosphate
  modified_base 11: mod_base = OTHER; note = 2'-O-methyladenosine-3'-phosphate
  modified_base 12: mod_base = OTHER; note = 2'-fluoroguanosine-3'-phosphate
  modified_base 13: mod_base = OTHER; note = 2'-O-methyluridine-3'-phosphate
  modified_base 14: mod_base = OTHER; note = 2'-fluorouridine-3'-phosphate
  modified_base 15: mod_base = OTHER; note = 2'-O-methylcytidine-3'-phosphate
  modified_base 16: mod_base = OTHER; note = 2'-fluorocytidine-3'-phosphate
  modified_base 17: mod_base = OTHER; note = 2'-O-methyladenosine-3'-phosphate
  modified_base 18: mod_base = OTHER; note = 2'-fluorouridine-3'-phosphate
  modified_base 19: mod_base = OTHER; note = 2'-O-methylguanosine-3'-phosphorothioate
  modified_base 20: mod_base = OTHER; note = 2'-O-methylguanosine-3'-phosphorothioate
  modified_base 21: mod_base = OTHER; note = 2'-O-methylguanosine
atcggcctccagttccatggg

SEQ ID NO: 1063 - RNA, 21 nt, synthetic construct
  source 1..21: mol_type = other RNA
  modified_base 1: mod_base = OTHER; note = 5'-phosphate-2'-O-methyladenosine-3'-phosphorothioate
  modified_base 2: mod_base = OTHER; note = 2'-fluorouridine-3'-phosphorothioate
  modified_base 3: mod_base = OTHER; note = 2'-O-methylguanosine-3'-phosphate
  modified_base 4: mod_base = OTHER; note = 2'-fluorouridine-3'-phosphate
  modified_base 5: mod_base = OTHER; note = 2'-O-methylguanosine-3'-phosphate
  modified_base 6: mod_base = OTHER; note = 2'-fluoroguanosine-3'-phosphate
  modified_base 7: mod_base = OTHER; note = 2'-O-methylcytidine-3'-phosphate
  modified_base 8: mod_base = OTHER; note = 2'-fluorouridine-3'-phosphate
  modified_base 9: mod_base = OTHER; note = 2'-O-methylcytidine-3'-phosphate
  modified_base 10: mod_base = OTHER; note = 2'-fluoroadenosine-3'-phosphate
  modified_base 11: mod_base = OTHER; note = 2'-O-methyladenosine-3'-phosphate
  modified_base 12: mod_base = OTHER; note = 2'-fluoroguanosine-3'-phosphate
  modified_base 13: mod_base = OTHER; note = 2'-O-methylcytidine-3'-phosphate
  modified_base 14: mod_base = OTHER; note = 2'-fluoroadenosine-3'-phosphate
  modified_base 15: mod_base = OTHER; note = 2'-O-methylguanosine-3'-phosphate
  modified_base 16: mod_base = OTHER; note = 2'-fluorocytidine-3'-phosphate
  modified_base 17: mod_base = OTHER; note = 2'-O-methyluridine-3'-phosphate
  modified_base 18: mod_base = OTHER; note = 2'-fluoroguanosine-3'-phosphate
  modified_base 19: mod_base = OTHER; note = 2'-O-methylcytidine-3'-phosphorothioate
  modified_base 20: mod_base = OTHER; note = 2'-O-methyluridine-3'-phosphorothioate
  modified_base 21: mod_base = OTHER; note = 2'-O-methylcytidine
atgtggctcaagcagctgctc

SEQ ID NO: 1064 - RNA, 21 nt, synthetic construct
  source 1..21: mol_type = other RNA
  modified_base 1: mod_base = OTHER; note = 5'-phosphate-2'-O-methyladenosine-3'-phosphorothioate
  modified_base 2: mod_base = OTHER; note = 2'-fluoroadenosine-3'-phosphorothioate
  modified_base 3: mod_base = OTHER; note = 2'-O-methylcytidine-3'-phosphate
  modified_base 4: mod_base = OTHER; note = 2'-fluoroguanosine-3'-phosphate
  modified_base 5: mod_base = OTHER; note = 2'-O-methyluridine-3'-phosphate
  modified_base 6: mod_base = OTHER; note = 2'-fluoroguanosine-3'-phosphate
  modified_base 7: mod_base = OTHER; note = 2'-O-methyluridine-3'-phosphate
  modified_base 8: mod_base = OTHER; note = 2'-fluoroguanosine-3'-phosphate
  modified_base 9: mod_base = OTHER; note = 2'-O-methylguanosine-3'-phosphate
  modified_base 10: mod_base = OTHER; note = 2'-fluorocytidine-3'-phosphate
  modified_base 11: mod_base = OTHER; note = 2'-O-methyluridine-3'-phosphate
  modified_base 12: mod_base = OTHER; note = 2'-fluorocytidine-3'-phosphate
  modified_base 13: mod_base = OTHER; note = 2'-O-methyladenosine-3'-phosphate
  modified_base 14: mod_base = OTHER; note = 2'-fluoroadenosine-3'-phosphate
  modified_base 15: mod_base = OTHER; note = 2'-O-methylguanosine-3'-phosphate
  modified_base 16: mod_base = OTHER; note = 2'-fluorocytidine-3'-phosphate
  modified_base 17: mod_base = OTHER; note = 2'-O-methyladenosine-3'-phosphate
  modified_base 18: mod_base = OTHER; note = 2'-fluoroguanosine-3'-phosphate
  modified_base 19: mod_base = OTHER; note = 2'-O-methylcytidine-3'-phosphorothioate
  modified_base 20: mod_base = OTHER; note = 2'-O-methyluridine-3'-phosphorothioate
  modified_base 21: mod_base = OTHER; note = 2'-O-methylguanosine
aacgtgtggctcaagcagctg

SEQ ID NO: 1065 - RNA, 21 nt, synthetic construct
  source 1..21: mol_type = other RNA
  modified_base 1: mod_base = OTHER; note = 5'-phosphate-2'-O-methyladenosine-3'-phosphorothioate
  modified_base 2: mod_base = OTHER; note = 2'-fluorouridine-3'-phosphorothioate
  modified_base 3: mod_base = OTHER; note = 2'-O-methyluridine-3'-phosphate
  modified_base 4: mod_base = OTHER; note = 2'-fluoroguanosine-3'-phosphate
  modified_base 5: mod_base = OTHER; note = 2'-O-methylcytidine-3'-phosphate
  modified_base 6: mod_base = OTHER; note = 2'-fluoroadenosine-3'-phosphate
  modified_base 7: mod_base = OTHER; note = 2'-O-methylcytidine-3'-phosphate
  modified_base 8: mod_base = OTHER; note = 2'-fluoroguanosine-3'-phosphate
  modified_base 9: mod_base = OTHER; note = 2'-O-methyluridine-3'-phosphate
  modified_base 10: mod_base = OTHER; note = 2'-fluoroguanosine-3'-phosphate
  modified_base 11: mod_base = OTHER; note = 2'-O-methyluridine-3'-phosphate
  modified_base 12: mod_base = OTHER; note = 2'-fluoroguanosine-3'-phosphate
  modified_base 13: mod_base = OTHER; note = 2'-O-methylguanosine-3'-phosphate
  modified_base 14: mod_base = OTHER; note = 2'-fluorocytidine-3'-phosphate
  modified_base 15: mod_base = OTHER; note = 2'-O-methyluridine-3'-phosphate
  modified_base 16: mod_base = OTHER; note = 2'-fluorocytidine-3'-phosphate
  modified_base 17: mod_base = OTHER; note = 2'-O-methyladenosine-3'-phosphate
  modified_base 18: mod_base = OTHER; note = 2'-fluoroadenosine-3'-phosphate
  modified_base 19: mod_base = OTHER; note = 2'-O-methylguanosine-3'-phosphorothioate
  modified_base 20: mod_base = OTHER; note = 2'-O-methylcytidine-3'-phosphorothioate
  modified_base 21: mod_base = OTHER; note = 2'-O-methyladenosine
attgcacgtgtggctcaagca

SEQ ID NO: 1066 - RNA, 21 nt, synthetic construct
  source 1..21: mol_type = other RNA
  modified_base 1: mod_base = OTHER; note = 5'-phosphate-2'-O-methyladenosine-3'-phosphorothioate
  modified_base 2: mod_base = OTHER; note = 2'-fluoroadenosine-3'-phosphorothioate
  modified_base 3: mod_base = OTHER; note = 2'-O-methylcytidine-3'-phosphate
  modified_base 4: mod_base = OTHER; note = 2'-fluorouridine-3'-phosphate
  modified_base 5: mod_base = OTHER; note = 2'-O-methyluridine-3'-phosphate
  modified_base 6: mod_base = OTHER; note = 2'-fluorocytidine-3'-phosphate
  modified_base 7: mod_base = OTHER; note = 2'-O-methyladenosine-3'-phosphate
  modified_base 8: mod_base = OTHER; note = 2'-fluoroguanosine-3'-phosphate
  modified_base 9: mod_base = OTHER; note = 2'-O-methylcytidine-3'-phosphate
  modified_base 10: mod_base = OTHER; note = 2'-fluorouridine-3'-phosphate
  modified_base 11: mod_base = OTHER; note = 2'-O-methylguanosine-3'-phosphate
  modified_base 12: mod_base = OTHER; note = 2'-fluorouridine-3'-phosphate
  modified_base 13: mod_base = OTHER; note = 2'-O-methyluridine-3'-phosphate
  modified_base 14: mod_base = OTHER; note = 2'-fluorouridine-3'-phosphate
  modified_base 15: mod_base = OTHER; note = 2'-O-methylcytidine-3'-phosphate
  modified_base 16: mod_base = OTHER; note = 2'-fluoroadenosine-3'-phosphate
  modified_base 17: mod_base = OTHER; note = 2'-O-methyluridine-3'-phosphate
  modified_base 18: mod_base = OTHER; note = 2'-fluorocytidine-3'-phosphate
  modified_base 19: mod_base = OTHER; note = 2'-O-methylcytidine-3'-phosphorothioate
  modified_base 20: mod_base = OTHER; note = 2'-O-methyluridine-3'-phosphorothioate
  modified_base 21: mod_base = OTHER; note = 2'-O-methylguanosine
aacttcagctgtttcatcctg

SEQ ID NO: 1067 - RNA, 21 nt, synthetic construct
  source 1..21: mol_type = other RNA
  modified_base 1: mod_base = OTHER; note = 5'-phosphate-2'-O-methyladenosine-3'-phosphorothioate
  modified_base 2: mod_base = OTHER; note = 2'-fluorocytidine-3'-phosphorothioate
  modified_base 3: mod_base = OTHER; note = 2'-O-methyladenosine-3'-phosphate
  modified_base 4: mod_base = OTHER; note = 2'-fluorocytidine-3'-phosphate
  modified_base 5: mod_base = OTHER; note = 2'-O-methyluridine-3'-phosphate
  modified_base 6: mod_base = OTHER; note = 2'-fluorouridine-3'-phosphate
  modified_base 7: mod_base = OTHER; note = 2'-O-methylcytidine-3'-phosphate
  modified_base 8: mod_base = OTHER; note = 2'-fluoroadenosine-3'-phosphate
  modified_base 9: mod_base = OTHER; note = 2'-O-methylguanosine-3'-phosphate
  modified_base 10: mod_base = OTHER; note = 2'-fluorocytidine-3'-phosphate
  modified_base 11: mod_base = OTHER; note = 2'-O-methyluridine-3'-phosphate
  modified_base 12: mod_base = OTHER; note = 2'-fluoroguanosine-3'-phosphate
  modified_base 13: mod_base = OTHER; note = 2'-O-methyluridine-3'-phosphate
  modified_base 14: mod_base = OTHER; note = 2'-fluorouridine-3'-phosphate
  modified_base 15: mod_base = OTHER; note = 2'-O-methyluridine-3'-phosphate
  modified_base 16: mod_base = OTHER; note = 2'-fluorocytidine-3'-phosphate
  modified_base 17: mod_base = OTHER; note = 2'-O-methyladenosine-3'-phosphate
  modified_base 18: mod_base = OTHER; note = 2'-fluorouridine-3'-phosphate
  modified_base 19: mod_base = OTHER; note = 2'-O-methylcytidine-3'-phosphorothioate
  modified_base 20: mod_base = OTHER; note = 2'-O-methylcytidine-3'-phosphorothioate
  modified_base 21: mod_base = OTHER; note = 2'-O-methyluridine
acacttcagctgtttcatcct

SEQ ID NO: 1068 - RNA, 21 nt, synthetic construct
  source 1..21: mol_type = other RNA
  modified_base 1: mod_base = OTHER; note = 5'-phosphate-2'-O-methyladenosine-3'-phosphorothioate
  modified_base 2: mod_base = OTHER; note = 2'-fluorouridine-3'-phosphorothioate
  modified_base 3: mod_base = OTHER; note = 2'-O-methylguanosine-3'-phosphate
  modified_base 4: mod_base = OTHER; note = 2'-fluorocytidine-3'-phosphate
  modified_base 5: mod_base = OTHER; note = 2'-O-methylcytidine-3'-phosphate
  modified_base 6: mod_base = OTHER; note = 2'-fluoroadenosine-3'-phosphate
  modified_base 7: mod_base = OTHER; note = 2'-O-methylcytidine-3'-phosphate
  modified_base 8: mod_base = OTHER; note = 2'-fluorouridine-3'-phosphate
  modified_base 9: mod_base = OTHER; note = 2'-O-methyluridine-3'-phosphate
  modified_base 10: mod_base = OTHER; note = 2'-fluorocytidine-3'-phosphate
  modified_base 11: mod_base = OTHER; note = 2'-O-methyladenosine-3'-phosphate
  modified_base 12: mod_base = OTHER; note = 2'-fluoroguanosine-3'-phosphate
  modified_base 13: mod_base = OTHER; note = 2'-O-methylcytidine-3'-phosphate
  modified_base 14: mod_base = OTHER; note = 2'-fluorouridine-3'-phosphate
  modified_base 15: mod_base = OTHER; note = 2'-O-methylguanosine-3'-phosphate
  modified_base 16: mod_base = OTHER; note = 2'-fluorouridine-3'-phosphate
  modified_base 17: mod_base = OTHER; note = 2'-O-methyluridine-3'-phosphate
  modified_base 18: mod_base = OTHER; note = 2'-fluorouridine-3'-phosphate
  modified_base 19: mod_base = OTHER; note = 2'-O-methylcytidine-3'-phosphorothioate
  modified_base 20: mod_base = OTHER; note = 2'-O-methyladenosine-3'-phosphorothioate
  modified_base 21: mod_base = OTHER; note = 2'-O-methyluridine
atgccacttcagctgtttcat

SEQ ID NO: 1069 - RNA, 21 nt, synthetic construct
  source 1..21: mol_type = other RNA
  modified_base 1: mod_base = OTHER; note = 5'-phosphate-2'-O-methyladenosine-3'-phosphorothioate
  modified_base 2: mod_base = OTHER; note = 2'-fluoroadenosine-3'-phosphorothioate
  modified_base 3: mod_base = OTHER; note = 2'-O-methylcytidine-3'-phosphate
  modified_base 4: mod_base = OTHER; note = 2'-fluorouridine-3'-phosphate
  modified_base 5: mod_base = OTHER; note = 2'-O-methylguanosine-3'-phosphate
  modified_base 6: mod_base = OTHER; note = 2'-fluorocytidine-3'-phosphate
  modified_base 7: mod_base = OTHER; note = 2'-O-methylcytidine-3'-phosphate
  modified_base 8: mod_base = OTHER; note = 2'-fluoroadenosine-3'-phosphate
  modified_base 9: mod_base = OTHER; note = 2'-O-methylcytidine-3'-phosphate
  modified_base 10: mod_base = OTHER; note = 2'-fluorouridine-3'-phosphate
  modified_base 11: mod_base = OTHER; note = 2'-O-methyluridine-3'-phosphate
  modified_base 12: mod_base = OTHER; note = 2'-fluorocytidine-3'-phosphate
  modified_base 13: mod_base = OTHER; note = 2'-O-methyladenosine-3'-phosphate
  modified_base 14: mod_base = OTHER; note = 2'-fluoroguanosine-3'-phosphate
  modified_base 15: mod_base = OTHER; note = 2'-O-methylcytidine-3'-phosphate
  modified_base 16: mod_base = OTHER; note = 2'-fluorouridine-3'-phosphate
  modified_base 17: mod_base = OTHER; note = 2'-O-methylguanosine-3'-phosphate
  modified_base 18: mod_base = OTHER; note = 2'-fluorouridine-3'-phosphate
  modified_base 19: mod_base = OTHER; note = 2'-O-methyluridine-3'-phosphorothioate
  modified_base 20: mod_base = OTHER; note = 2'-O-methyluridine-3'-phosphorothioate
  modified_base 21: mod_base = OTHER; note = 2'-O-methylcytidine
aactgccacttcagctgtttc

SEQ ID NO: 1070 - RNA, 21 nt, synthetic construct
  source 1..21: mol_type = other RNA
  modified_base 1: mod_base = OTHER; note = 5'-phosphate-2'-O-methyladenosine-3'-phosphorothioate
  modified_base 2: mod_base = OTHER; note = 2'-fluorouridine-3'-phosphorothioate
  modified_base 3: mod_base = OTHER; note = 2'-O-methylguanosine-3'-phosphate
  modified_base 4: mod_base = OTHER; note = 2'-fluoroguanosine-3'-phosphate
  modified_base 5: mod_base = OTHER; note = 2'-O-methyladenosine-3'-phosphate
  modified_base 6: mod_base = OTHER; note = 2'-fluoroadenosine-3'-phosphate
  modified_base 7: mod_base = OTHER; note = 2'-O-methylcytidine-3'-phosphate
  modified_base 8: mod_base = OTHER; note = 2'-fluorouridine-3'-phosphate
  modified_base 9: mod_base = OTHER; note = 2'-O-methylguanosine-3'-phosphate
  modified_base 10: mod_base = OTHER; note = 2'-fluorocytidine-3'-phosphate
  modified_base 11: mod_base = OTHER; note = 2'-O-methylcytidine-3'-phosphate
  modified_base 12: mod_base = OTHER; note = 2'-fluoroadenosine-3'-phosphate
  modified_base 13: mod_base = OTHER; note = 2'-O-methylcytidine-3'-phosphate
  modified_base 14: mod_base = OTHER; note = 2'-fluorouridine-3'-phosphate
  modified_base 15: mod_base = OTHER; note = 2'-O-methyluridine-3'-phosphate
  modified_base 16: mod_base = OTHER; note = 2'-fluorocytidine-3'-phosphate
  modified_base 17: mod_base = OTHER; note = 2'-O-methyladenosine-3'-phosphate
  modified_base 18: mod_base = OTHER; note = 2'-fluoroguanosine-3'-phosphate
  modified_base 19: mod_base = OTHER; note = 2'-O-methylcytidine-3'-phosphorothioate
  modified_base 20: mod_base = OTHER; note = 2'-O-methyluridine-3'-phosphorothioate
  modified_base 21: mod_base = OTHER; note = 2'-O-methylguanosine
atggaactgccacttcagctg

SEQ ID NO: 1071 - RNA, 21 nt, synthetic construct
  source 1..21: mol_type = other RNA
  modified_base 1: mod_base = OTHER; note = 5'-phosphate-2'-O-methyladenosine-3'-phosphorothioate
  modified_base 2: mod_base = OTHER; note = 2'-fluorouridine-3'-phosphorothioate
  modified_base 3: mod_base = OTHER; note = 2'-O-methylguanosine-3'-phosphate
  modified_base 4: mod_base = OTHER; note = 2'-fluorocytidine-3'-phosphate
  modified_base 5: mod_base = OTHER; note = 2'-O-methylcytidine-3'-phosphate
  modified_base 6: mod_base = OTHER; note = 2'-fluorouridine-3'-phosphate
  modified_base 7: mod_base = OTHER; note = 2'-O-methylcytidine-3'-phosphate
  modified_base 8: mod_base = OTHER; note = 2'-fluoroguanosine-3'-phosphate
  modified_base 9: mod_base = OTHER; note = 2'-O-methylcytidine-3'-phosphate
  modified_base 10: mod_base = OTHER; note = 2'-fluoroguanosine-3'-phosphate
  modified_base 11: mod_base = OTHER; note = 2'-O-methyluridine-3'-phosphate
  modified_base 12: mod_base = OTHER; note = 2'-fluoroadenosine-3'-phosphate
  modified_base 13: mod_base = OTHER; note = 2'-O-methylguanosine-3'-phosphate
  modified_base 14: mod_base = OTHER; note = 2'-fluorouridine-3'-phosphate
  modified_base 15: mod_base = OTHER; note = 2'-O-methyluridine-3'-phosphate
  modified_base 16: mod_base = OTHER; note = 2'-fluoroguanosine-3'-phosphate
  modified_base 17: mod_base = OTHER; note = 2'-O-methyladenosine-3'-phosphate
  modified_base 18: mod_base = OTHER; note = 2'-fluorocytidine-3'-phosphate
  modified_base 19: mod_base = OTHER; note = 2'-O-methyluridine-3'-phosphorothioate
  modified_base 20: mod_base = OTHER; note = 2'-O-methylguanosine-3'-phosphorothioate
  modified_base 21: mod_base = OTHER; note = 2'-O-methylguanosine
atgcctcgcgtagttgactgg

SEQ ID NO: 1072 - RNA, 21 nt, synthetic construct
  source 1..21: mol_type = other RNA
  modified_base 1: mod_base = OTHER; note = 5'-phosphate-2'-O-methyladenosine-3'-phosphorothioate
  modified_base 2: mod_base = OTHER; note = 2'-fluorouridine-3'-phosphorothioate
  modified_base 3: mod_base = OTHER; note = 2'-O-methylcytidine-3'-phosphate
  modified_base 4: mod_base = OTHER; note = 2'-fluorouridine-3'-phosphate
  modified_base 5: mod_base = OTHER; note = 2'-O-methylguanosine-3'-phosphate
  modified_base 6: mod_base = OTHER; note = 2'-fluorocytidine-3'-phosphate
  modified_base 7: mod_base = OTHER; note = 2'-O-methylcytidine-3'-phosphate
  modified_base 8: mod_base = OTHER; note = 2'-fluorouridine-3'-phosphate
  modified_base 9: mod_base = OTHER; note = 2'-O-methylcytidine-3'-phosphate
  modified_base 10: mod_base = OTHER; note = 2'-fluoroguanosine-3'-phosphate
  modified_base 11: mod_base = OTHER; note = 2'-O-methylcytidine-3'-phosphate
  modified_base 12: mod_base = OTHER; note = 2'-fluoroguanosine-3'-phosphate
  modified_base 13: mod_base = OTHER; note = 2'-O-methyluridine-3'-phosphate
  modified_base 14: mod_base = OTHER; note = 2'-fluoroadenosine-3'-phosphate
  modified_base 15: mod_base = OTHER; note = 2'-O-methylguanosine-3'-phosphate
  modified_base 16: mod_base = OTHER; note = 2'-fluorouridine-3'-phosphate
  modified_base 17: mod_base = OTHER; note = 2'-O-methyluridine-3'-phosphate
  modified_base 18: mod_base = OTHER; note = 2'-fluoroguanosine-3'-phosphate
  modified_base 19: mod_base = OTHER; note = 2'-O-methyladenosine-3'-phosphorothioate
  modified_base 20: mod_base = OTHER; note = 2'-O-methylcytidine-3'-phosphorothioate
  modified_base 21: mod_base = OTHER; note = 2'-O-methyluridine
atctgcctcgcgtagttgact

SEQ ID NO: 1073 - RNA, 21 nt, synthetic construct
  source 1..21: mol_type = other RNA
  modified_base 1: mod_base = OTHER; note = 5'-phosphate-2'-O-methyladenosine-3'-phosphorothioate
  modified_base 2: mod_base = OTHER; note = 2'-fluoroadenosine-3'-phosphorothioate
  modified_base 3: mod_base = OTHER; note = 2'-O-methylguanosine-3'-phosphate
  modified_base 4: mod_base = OTHER; note = 2'-fluorocytidine-3'-phosphate
  modified_base 5: mod_base = OTHER; note = 2'-O-methylcytidine-3'-phosphate
  modified_base 6: mod_base = OTHER; note = 2'-fluorouridine-3'-phosphate
  modified_base 7: mod_base = OTHER; note = 2'-O-methylcytidine-3'-phosphate
  modified_base 8: mod_base = OTHER; note = 2'-fluorouridine-3'-phosphate
  modified_base 9: mod_base = OTHER; note = 2'-O-methylguanosine-3'-phosphate
  modified_base 10: mod_base = OTHER; note = 2'-fluorocytidine-3'-phosphate
  modified_base 11: mod_base = OTHER; note = 2'-O-methylcytidine-3'-phosphate
  modified_base 12: mod_base = OTHER; note = 2'-fluorouridine-3'-phosphate
  modified_base 13: mod_base = OTHER; note = 2'-O-methylcytidine-3'-phosphate
  modified_base 14: mod_base = OTHER; note = 2'-fluoroguanosine-3'-phosphate
  modified_base 15: mod_base = OTHER; note = 2'-O-methylcytidine-3'-phosphate
  modified_base 16: mod_base = OTHER; note = 2'-fluoroguanosine-3'-phosphate
  modified_base 17: mod_base = OTHER; note = 2'-O-methyluridine-3'-phosphate
  modified_base 18: mod_base = OTHER; note = 2'-fluoroadenosine-3'-phosphate
  modified_base 19: mod_base = OTHER; note = 2'-O-methylguanosine-3'-phosphorothioate
  modified_base 20: mod_base = OTHER; note = 2'-O-methyluridine-3'-phosphorothioate
  modified_base 21: mod_base = OTHER; note = 2'-O-methyluridine
aagcctctgcctcgcgtagtt

SEQ ID NO: 1074 - RNA, 21 nt, synthetic construct
  source 1..21: mol_type = other RNA
  modified_base 1: mod_base = OTHER; note = 5'-phosphate-2'-O-methylguanosine-3'-phosphorothioate
  modified_base 2: mod_base = OTHER; note = 2'-fluorouridine-3'-phosphorothioate
  modified_base 3: mod_base = OTHER; note = 2'-O-methyluridine-3'-phosphate
  modified_base 4: mod_base = OTHER; note = 2'-fluorocytidine-3'-phosphate
  modified_base 5: mod_base = OTHER; note = 2'-O-methylcytidine-3'-phosphate
  modified_base 6: mod_base = OTHER; note = 2'-fluoroguanosine-3'-phosphate
  modified_base 7: mod_base = OTHER; note = 2'-O-methyladenosine-3'-phosphate
  modified_base 8: mod_base = OTHER; note = 2'-fluoroguanosine-3'-phosphate
  modified_base 9: mod_base = OTHER; note = 2'-O-methylcytidine-3'-phosphate
  modified_base 10: mod_base = OTHER; note = 2'-fluorocytidine-3'-phosphate
  modified_base 11: mod_base = OTHER; note = 2'-O-methyluridine-3'-phosphate
  modified_base 12: mod_base = OTHER; note = 2'-fluorocytidine-3'-phosphate
  modified_base 13: mod_base = OTHER; note = 2'-O-methyluridine-3'-phosphate
  modified_base 14: mod_base = OTHER; note = 2'-fluoroguanosine-3'-phosphate
  modified_base 15: mod_base = OTHER; note = 2'-O-methylcytidine-3'-phosphate
  modified_base 16: mod_base = OTHER; note = 2'-fluorocytidine-3'-phosphate
  modified_base 17: mod_base = OTHER; note = 2'-O-methyluridine-3'-phosphate
  modified_base 18: mod_base = OTHER; note = 2'-fluorocytidine-3'-phosphate
  modified_base 19: mod_base = OTHER; note = 2'-O-methylguanosine-3'-phosphorothioate
  modified_base 20: mod_base = OTHER; note = 2'-O-methylcytidine-3'-phosphorothioate
  modified_base 21: mod_base = OTHER; note = 2'-O-methylguanosine
gttccgagcctctgcctcgcg

SEQ ID NO: 1075 - RNA, 21 nt, synthetic construct
  source 1..21: mol_type = other RNA
  modified_base 1: mod_base = OTHER; note = 5'-phosphate-2'-O-methyluridine-3'-phosphorothioate
  modified_base 2: mod_base = OTHER; note = 2'-fluoroadenosine-3'-phosphorothioate
  modified_base 3: mod_base = OTHER; note = 2'-O-methylguanosine-3'-phosphate
  modified_base 4: mod_base = OTHER; note = 2'-fluoroguanosine-3'-phosphate
  modified_base 5: mod_base = OTHER; note = 2'-O-methyluridine-3'-phosphate
  modified_base 6: mod_base = OTHER; note = 2'-fluorocytidine-3'-phosphate
  modified_base 7: mod_base = OTHER; note = 2'-O-methylcytidine-3'-phosphate
  modified_base 8: mod_base = OTHER; note = 2'-fluorocytidine-3'-phosphate
  modified_base 9: mod_base = OTHER; note = 2'-O-methylguanosine-3'-phosphate
  modified_base 10: mod_base = OTHER; note = 2'-fluoroguanosine-3'-phosphate
  modified_base 11: mod_base = OTHER; note = 2'-O-methyluridine-3'-phosphate
  modified_base 12: mod_base = OTHER; note = 2'-fluorouridine-3'-phosphate
  modified_base 13: mod_base = OTHER; note = 2'-O-methylcytidine-3'-phosphate
  modified_base 14: mod_base = OTHER; note = 2'-fluorocytidine-3'-phosphate
  modified_base 15: mod_base = OTHER; note = 2'-O-methylguanosine-3'-phosphate
  modified_base 16: mod_base = OTHER; note = 2'-fluoroadenosine-3'-phosphate
  modified_base 17: mod_base = OTHER; note = 2'-O-methylguanosine-3'-phosphate
  modified_base 18: mod_base = OTHER; note = 2'-fluorocytidine-3'-phosphate
  modified_base 19: mod_base = OTHER; note = 2'-O-methylcytidine-3'-phosphorothioate
  modified_base 20: mod_base = OTHER; note = 2'-O-methyluridine-3'-phosphorothioate
  modified_base 21: mod_base = OTHER; note = 2'-O-methylcytidine
taggtcccggttccgagcctc

SEQ ID NO: 1076 - RNA, 21 nt, synthetic construct
  source 1..21: mol_type = other RNA
  modified_base 1: mod_base = OTHER; note = 5'-phosphate-2'-O-methyladenosine-3'-phosphorothioate
  modified_base 2: mod_base = OTHER; note = 2'-fluorouridine-3'-phosphorothioate
  modified_base 3: mod_base = OTHER; note = 2'-O-methyladenosine-3'-phosphate
  modified_base 4: mod_base = OTHER; note = 2'-fluoroguanosine-3'-phosphate
  modified_base 5: mod_base = OTHER; note = 2'-O-methylguanosine-3'-phosphate
  modified_base 6: mod_base = OTHER; note = 2'-fluorouridine-3'-phosphate
  modified_base 7: mod_base = OTHER; note = 2'-O-methylcytidine-3'-phosphate
  modified_base 8: mod_base = OTHER; note = 2'-fluorocytidine-3'-phosphate
  modified_base 9: mod_base = OTHER; note = 2'-O-methylcytidine-3'-phosphate
  modified_base 10: mod_base = OTHER; note = 2'-fluoroguanosine-3'-phosphate
  modified_base 11: mod_base = OTHER; note = 2'-O-methylguanosine-3'-phosphate
  modified_base 12: mod_base = OTHER; note = 2'-fluorouridine-3'-phosphate
  modified_base 13: mod_base = OTHER; note = 2'-O-methyluridine-3'-phosphate
  modified_base 14: mod_base = OTHER; note = 2'-fluorocytidine-3'-phosphate
  modified_base 15: mod_base = OTHER; note = 2'-O-methylcytidine-3'-phosphate
  modified_base 16: mod_base = OTHER; note = 2'-fluoroguanosine-3'-phosphate
  modified_base 17: mod_base = OTHER; note = 2'-O-methyladenosine-3'-phosphate
  modified_base 18: mod_base = OTHER; note = 2'-fluoroguanosine-3'-phosphate
  modified_base 19: mod_base = OTHER; note = 2'-O-methylcytidine-3'-phosphorothioate
  modified_base 20: mod_base = OTHER; note = 2'-O-methylcytidine-3'-phosphorothioate
  modified_base 21: mod_base = OTHER; note = 2'-O-methyluridine
ataggtcccggttccgagcct

SEQ ID NO: 1077 - RNA, 21 nt, synthetic construct
  source 1..21: mol_type = other RNA
  modified_base 1: mod_base = OTHER; note = 5'-phosphate-2'-O-methyladenosine-3'-phosphorothioate
  modified_base 2: mod_base = OTHER; note = 2'-fluorouridine-3'-phosphorothioate
  modified_base 3: mod_base = OTHER; note = 2'-O-methylcytidine-3'-phosphate
  modified_base 4: mod_base = OTHER; note = 2'-fluorouridine-3'-phosphate
  modified_base 5: mod_base = OTHER; note = 2'-O-methyladenosine-3'-phosphate
  modified_base 6: mod_base = OTHER; note = 2'-fluoroguanosine-3'-phosphate
  modified_base 7: mod_base = OTHER; note = 2'-O-methylguanosine-3'-phosphate
  modified_base 8: mod_base = OTHER; note = 2'-fluorouridine-3'-phosphate
  modified_base 9: mod_base = OTHER; note = 2'-O-methylcytidine-3'-phosphate
  modified_base 10: mod_base = OTHER; note = 2'-fluorocytidine-3'-phosphate
  modified_base 11: mod_base = OTHER; note = 2'-O-methylcytidine-3'-phosphate
  modified_base 12: mod_base = OTHER; note = 2'-fluoroguanosine-3'-phosphate
  modified_base 13: mod_base = OTHER; note = 2'-O-methylguanosine-3'-phosphate
  modified_base 14: mod_base = OTHER; note = 2'-fluorouridine-3'-phosphate
  modified_base 15: mod_base = OTHER; note = 2'-O-methyluridine-3'-phosphate
  modified_base 16: mod_base = OTHER; note = 2'-fluorocytidine-3'-phosphate
  modified_base 17: mod_base = OTHER; note = 2'-O-methylcytidine-3'-phosphate
  modified_base 18: mod_base = OTHER; note = 2'-fluoroguanosine-3'-phosphate
  modified_base 19: mod_base = OTHER; note = 2'-O-methyladenosine-3'-phosphorothioate
  modified_base 20: mod_base = OTHER; note = 2'-O-methylguanosine-3'-phosphorothioate
  modified_base 21: mod_base = OTHER; note = 2'-O-methylcytidine
atctaggtcccggttccgagc

SEQ ID NO: 1078 - RNA, 21 nt, synthetic construct
  source 1..21: mol_type = other RNA
  modified_base 1: mod_base = OTHER; note = 5'-phosphate-2'-O-methyladenosine-3'-phosphorothioate
  modified_base 2: mod_base = OTHER; note = 2'-fluoroadenosine-3'-phosphorothioate
  modified_base 3: mod_base = OTHER; note = 2'-O-methyluridine-3'-phosphate
  modified_base 4: mod_base = OTHER; note = 2'-fluorocytidine-3'-phosphate
  modified_base 5: mod_base = OTHER; note = 2'-O-methylcytidine-3'-phosphate
  modified_base 6: mod_base = OTHER; note = 2'-fluoroguanosine-3'-phosphate
  modified_base 7: mod_base = OTHER; note = 2'-O-methylcytidine-3'-phosphate
  modified_base 8: mod_base = OTHER; note = 2'-fluorouridine-3'-phosphate
  modified_base 9: mod_base = OTHER; note = 2'-O-methylcytidine-3'-phosphate
  modified_base 10: mod_base = OTHER; note = 2'-fluorocytidine-3'-phosphate
  modified_base 11: mod_base = OTHER; note = 2'-O-methyluridine-3'-phosphate
  modified_base 12: mod_base = OTHER; note = 2'-fluoroguanosine-3'-phosphate
  modified_base 13: mod_base = OTHER; note = 2'-O-methylcytidine-3'-phosphate
  modified_base 14: mod_base = OTHER; note = 2'-fluoroadenosine-3'-phosphate
  modified_base 15: mod_base = OTHER; note = 2'-O-methyladenosine-3'-phosphate
  modified_base 16: mod_base = OTHER; note = 2'-fluorocytidine-3'-phosphate
  modified_base 17: mod_base = OTHER; note = 2'-O-methyluridine-3'-phosphate
  modified_base 18: mod_base = OTHER; note = 2'-fluoroguanosine-3'-phosphate
  modified_base 19: mod_base = OTHER; note = 2'-O-methylcytidine-3'-phosphorothioate
  modified_base 20: mod_base = OTHER; note = 2'-O-methylcytidine-3'-phosphorothioate
  modified_base 21: mod_base = OTHER; note = 2'-O-methylguanosine
aatccgctcctgcaactgccg

SEQ ID NO: 1079 - RNA, 21 nt, synthetic construct
  source 1..21: mol_type = other RNA
  modified_base 1: mod_base = OTHER; note = 5'-phosphate-2'-O-methyladenosine-3'-phosphorothioate
  modified_base 2: mod_base = OTHER; note = 2'-fluoroadenosine-3'-phosphorothioate
  modified_base 3: mod_base = OTHER; note = 2'-O-methylcytidine-3'-phosphate
  modified_base 4: mod_base = OTHER; note = 2'-fluorouridine-3'-phosphate
  modified_base 5: mod_base = OTHER; note = 2'-O-methylcytidine-3'-phosphate
  modified_base 6: mod_base = OTHER; note = 2'-fluorocytidine-3'-phosphate
  modified_base 7: mod_base = OTHER; note = 2'-O-methyladenosine-3'-phosphate
  modified_base 8: mod_base = OTHER; note = 2'-fluorouridine-3'-phosphate
  modified_base 9: mod_base = OTHER; note = 2'-O-methylcytidine-3'-phosphate
  modified_base 10: mod_base = OTHER; note = 2'-fluorocytidine-3'-phosphate
  modified_base 11: mod_base = OTHER; note = 2'-O-methylguanosine-3'-phosphate
  modified_base 12: mod_base = OTHER; note = 2'-fluorocytidine-3'-phosphate
  modified_base 13: mod_base = OTHER; note = 2'-O-methyluridine-3'-phosphate
  modified_base 14: mod_base = OTHER; note = 2'-fluorocytidine-3'-phosphate
  modified_base 15: mod_base = OTHER; note = 2'-O-methylcytidine-3'-phosphate
  modified_base 16: mod_base = OTHER; note = 2'-fluorouridine-3'-phosphate
  modified_base 17: mod_base = OTHER; note = 2'-O-methylguanosine-3'-phosphate
  modified_base 18: mod_base = OTHER; note = 2'-fluorocytidine-3'-phosphate
  modified_base 19: mod_base = OTHER; note = 2'-O-methyladenosine-3'-phosphorothioate
  modified_base 20: mod_base = OTHER; note = 2'-O-methyladenosine-3'-phosphorothioate
  modified_base 21: mod_base = OTHER; note = 2'-O-methylcytidine
aactccatccgctcctgcaac

SEQ ID NO: 1080 - RNA, 21 nt, synthetic construct
  source 1..21: mol_type = other RNA
  modified_base 1: mod_base = OTHER; note = 5'-phosphate-2'-O-methyluridine-3'-phosphorothioate
  modified_base 2: mod_base = OTHER; note = 2'-fluoroadenosine-3'-phosphorothioate
  modified_base 3: mod_base = OTHER; note = 2'-O-methyladenosine-3'-phosphate
  modified_base 4: mod_base = OTHER; note = 2'-fluorocytidine-3'-phosphate
  modified_base 5: mod_base = OTHER; note = 2'-O-methyluridine-3'-phosphate
  modified_base 6: mod_base = OTHER; note = 2'-fluorocytidine-3'-phosphate
  modified_base 7: mod_base = OTHER; note = 2'-O-methylcytidine-3'-phosphate
  modified_base 8: mod_base = OTHER; note = 2'-fluoroadenosine-3'-phosphate
  modified_base 9: mod_base = OTHER; note = 2'-O-methyluridine-3'-phosphate
  modified_base 10: mod_base = OTHER; note = 2'-fluorocytidine-3'-phosphate
  modified_base 11: mod_base = OTHER; note = 2'-O-methylcytidine-3'-phosphate
  modified_base 12: mod_base = OTHER; note = 2'-fluoroguanosine-3'-phosphate
  modified_base 13: mod_base = OTHER; note = 2'-O-methylcytidine-3'-phosphate
  modified_base 14: mod_base = OTHER; note = 2'-fluorouridine-3'-phosphate
  modified_base 15: mod_base = OTHER; note = 2'-O-methylcytidine-3'-phosphate
  modified_base 16: mod_base = OTHER; note = 2'-fluorocytidine-3'-phosphate
  modified_base 17: mod_base = OTHER; note = 2'-O-methyluridine-3'-phosphate
  modified_base 18: mod_base = OTHER; note = 2'-fluoroguanosine-3'-phosphate
  modified_base 19: mod_base = OTHER; note = 2'-O-methylcytidine-3'-phosphorothioate
  modified_base 20: mod_base = OTHER; note = 2'-O-methyladenosine-3'-phosphorothioate
  modified_base 21: mod_base = OTHER; note = 2'-O-methyladenosine
taactccatccgctcctgcaa

SEQ ID NO: 1081 - RNA, 21 nt, synthetic construct
  source 1..21: mol_type = other RNA
  modified_base 1: mod_base = OTHER; note = 5'-phosphate-2'-O-methyladenosine-3'-phosphorothioate
  modified_base 2: mod_base = OTHER; note = 2'-fluoroadenosine-3'-phosphorothioate
  modified_base 3: mod_base = OTHER; note = 2'-O-methylguanosine-3'-phosphate
  modified_base 4: mod_base = OTHER; note = 2'-fluorocytidine-3'-phosphate
  modified_base 5: mod_base = OTHER; note = 2'-O-methyladenosine-3'-phosphate
  modified_base 6: mod_base = OTHER; note = 2'-fluoroadenosine-3'-phosphate
  modified_base 7: mod_base = OTHER; note = 2'-O-methylcytidine-3'-phosphate
  modified_base 8: mod_base = OTHER; note = 2'-fluorouridine-3'-phosphate
  modified_base 9: mod_base = OTHER; note = 2'-O-methylcytidine-3'-phosphate
  modified_base 10: mod_base = OTHER; note = 2'-fluorocytidine-3'-phosphate
  modified_base 11: mod_base = OTHER; note = 2'-O-methyladenosine-3'-phosphate
  modified_base 12: mod_base = OTHER; note = 2'-fluorouridine-3'-phosphate
  modified_base 13: mod_base = OTHER; note = 2'-O-methylcytidine-3'-phosphate
  modified_base 14: mod_base = OTHER; note = 2'-fluorocytidine-3'-phosphate
  modified_base 15: mod_base = OTHER; note = 2'-O-methylguanosine-3'-phosphate
  modified_base 16: mod_base = OTHER; note = 2'-fluorocytidine-3'-phosphate
  modified_base 17: mod_base = OTHER; note = 2'-O-methyluridine-3'-phosphate
  modified_base 18: mod_base = OTHER; note = 2'-fluorocytidine-3'-phosphate
  modified_base 19: mod_base = OTHER; note = 2'-O-methylcytidine-3'-phosphorothioate
  modified_base 20: mod_base = OTHER; note = 2'-O-methyluridine-3'-phosphorothioate
  modified_base 21: mod_base = OTHER; note = 2'-O-methylguanosine
aagcaactccatccgctcctg

SEQ ID NO: 1082 - RNA, 21 nt, synthetic construct
  source 1..21: mol_type = other RNA
  modified_base 1: mod_base = OTHER; note = 5'-phosphate-2'-O-methyladenosine-3'-phosphorothioate
  modified_base 2: mod_base = OTHER; note = 2'-fluorouridine-3'-phosphorothioate
  modified_base 3: mod_base = OTHER; note = 2'-O-methylcytidine-3'-phosphate
  modified_base 4: mod_base = OTHER; note = 2'-fluorocytidine-3'-phosphate
  modified_base 5: mod_base = OTHER; note = 2'-O-methylguanosine-3'-phosphate
  modified_base 6: mod_base = OTHER; note = 2'-fluoroadenosine-3'-phosphate
  modified_base 7: mod_base = OTHER; note = 2'-O-methyluridine-3'-phosphate
  modified_base 8: mod_base = OTHER; note = 2'-fluoroadenosine-3'-phosphate
  modified_base 9: mod_base = OTHER; note = 2'-O-methylguanosine-3'-phosphate
  modified_base 10: mod_base = OTHER; note = 2'-fluoroguanosine-3'-phosphate
  modified_base 11: mod_base = OTHER; note = 2'-O-methylcytidine-3'-phosphate
  modified_base 12: mod_base = OTHER; note = 2'-fluorocytidine-3'-phosphate
  modified_base 13: mod_base = OTHER; note = 2'-O-methyladenosine-3'-phosphate
  modified_base 14: mod_base = OTHER; note = 2'-fluoroguanosine-3'-phosphate
  modified_base 15: mod_base = OTHER; note = 2'-O-methylguanosine-3'-phosphate
  modified_base 16: mod_base = OTHER; note = 2'-fluorocytidine-3'-phosphate
  modified_base 17: mod_base = OTHER; note = 2'-O-methylcytidine-3'-phosphate
  modified_base 18: mod_base = OTHER; note = 2'-fluorouridine-3'-phosphate
  modified_base 19: mod_base = OTHER; note = 2'-O-methyladenosine-3'-phosphorothioate
  modified_base 20: mod_base = OTHER; note = 2'-O-methylguanosine-3'-phosphorothioate
  modified_base 21: mod_base = OTHER; note = 2'-O-methylguanosine
atccgataggccaggcctagg

SEQ ID NO: 1083 - RNA, 21 nt, synthetic construct
  source 1..21: mol_type = other RNA
  modified_base 1: mod_base = OTHER; note = 5'-phosphate-2'-O-methyladenosine-3'-phosphorothioate
  modified_base 2: mod_base = OTHER; note = 2'-fluoroadenosine-3'-phosphorothioate
  modified_base 3: mod_base = OTHER; note = 2'-O-methyladenosine-3'-phosphate
  modified_base 4: mod_base = OTHER; note = 2'-fluoroguanosine-3'-phosphate
  modified_base 5: mod_base = OTHER; note = 2'-O-methylcytidine-3'-phosphate
  modified_base 6: mod_base = OTHER; note = 2'-fluoroguanosine-3'-phosphate
  modified_base 7: mod_base = OTHER; note = 2'-O-methylcytidine-3'-phosphate
  modified_base 8: mod_base = OTHER; note = 2'-fluorocytidine-3'-phosphate
  modified_base 9: mod_base = OTHER; note = 2'-O-methyluridine-3'-phosphate
  modified_base 10: mod_base = OTHER; note = 2'-fluorocytidine-3'-phosphate
  modified_base 11: mod_base = OTHER; note = 2'-O-methylcytidine-3'-phosphate
  modified_base 12: mod_base = OTHER; note = 2'-fluoroguanosine-3'-phosphate
  modified_base 13: mod_base = OTHER; note = 2'-O-methyladenosine-3'-phosphate
  modified_base 14: mod_base = OTHER; note = 2'-fluorouridine-3'-phosphate
  modified_base 15: mod_base = OTHER; note = 2'-O-methyladenosine-3'-phosphate
  modified_base 16: mod_base = OTHER; note = 2'-fluoroguanosine-3'-phosphate
  modified_base 17: mod_base = OTHER; note = 2'-O-methylguanosine-3'-phosphate
  modified_base 18: mod_base = OTHER; note = 2'-fluorocytidine-3'-phosphate
  modified_base 19: mod_base = OTHER; note = 2'-O-methylcytidine-3'-phosphorothioate
  modified_base 20: mod_base = OTHER; note = 2'-O-methyladenosine-3'-phosphorothioate
  modified_base 21: mod_base = OTHER; note = 2'-O-methylguanosine
aaagcgcctccgataggccag

SEQ ID NO: 1084 - RNA, 21 nt, synthetic construct
  source 1..21: mol_type = other RNA
  modified_base 1: mod_base = OTHER; note = 5'-phosphate-2'-O-methyluridine-3'-phosphorothioate
  modified_base 2: mod_base = OTHER; note = 2'-fluoroadenosine-3'-phosphorothioate
  modified_base 3: mod_base = OTHER; note = 2'-O-methyladenosine-3'-phosphate
  modified_base 4: mod_base = OTHER; note = 2'-fluoroadenosine-3'-phosphate
  modified_base 5: mod_base = OTHER; note = 2'-O-methylguanosine-3'-phosphate
  modified_base 6: mod_base = OTHER; note = 2'-fluorocytidine-3'-phosphate
  modified_base 7: mod_base = OTHER; note = 2'-O-methylguanosine-3'-phosphate
  modified_base 8: mod_base = OTHER; note = 2'-fluorocytidine-3'-phosphate
  modified_base 9: mod_base = OTHER; note = 2'-O-methylcytidine-3'-phosphate
  modified_base 10: mod_base = OTHER; note = 2'-fluorouridine-3'-phosphate
  modified_base 11: mod_base = OTHER; note = 2'-O-methylcytidine-3'-phosphate
  modified_base 12: mod_base = OTHER; note = 2'-fluorocytidine-3'-phosphate
  modified_base 13: mod_base = OTHER; note = 2'-O-methylguanosine-3'-phosphate
  modified_base 14: mod_base = OTHER; note = 2'-fluoroadenosine-3'-phosphate
  modified_base 15: mod_base = OTHER; note = 2'-O-methyluridine-3'-phosphate
  modified_base 16: mod_base = OTHER; note = 2'-fluoroadenosine-3'-phosphate
  modified_base 17: mod_base = OTHER; note = 2'-O-methylguanosine-3'-phosphate
  modified_base 18: mod_base = OTHER; note = 2'-fluoroguanosine-3'-phosphate
  modified_base 19: mod_base = OTHER; note = 2'-O-methylcytidine-3'-phosphorothioate
  modified_base 20: mod_base = OTHER; note = 2'-O-methylcytidine-3'-phosphorothioate
  modified_base 21: mod_base = OTHER; note = 2'-O-methyladenosine
taaagcgcctccgataggcca

SEQ ID NO: 1085 - RNA, 21 nt, synthetic construct
  source 1..21: mol_type = other RNA
  modified_base 1: mod_base = OTHER; note = 5'-phosphate-2'-O-methyladenosine-3'-phosphorothioate
  modified_base 2: mod_base = OTHER; note = 2'-fluoroadenosine-3'-phosphorothioate
  modified_base 3: mod_base = OTHER; note = 2'-O-methylcytidine-3'-phosphate
  modified_base 4: mod_base = OTHER; note = 2'-fluoroadenosine-3'-phosphate
  modified_base 5: mod_base = OTHER; note = 2'-O-methylguanosine-3'-phosphate
  modified_base 6: mod_base = OTHER; note = 2'-fluoroguanosine-3'-phosphate
  modified_base 7: mod_base = OTHER; note = 2'-O-methyladenosine-3'-phosphate
  modified_base 8: mod_base = OTHER; note = 2'-fluoroguanosine-3'-phosphate
  modified_base 9: mod_base = OTHER; note = 2'-O-methylcytidine-3'-phosphate
  modified_base 10: mod_base = OTHER; note = 2'-fluoroadenosine-3'-phosphate
  modified_base 11: mod_base = OTHER; note = 2'-O-methylguanosine-3'-phosphate
  modified_base 12: mod_base = OTHER; note = 2'-fluoroguanosine-3'-phosphate
  modified_base 13: mod_base = OTHER; note = 2'-O-methylguanosine-3'-phosphate
  modified_base 14: mod_base = OTHER; note = 2'-fluoroadenosine-3'-phosphate
  modified_base 15: mod_base = OTHER; note = 2'-O-methyladenosine-3'-phosphate
  modified_base 16: mod_base = OTHER; note = 2'-fluoroadenosine-3'-phosphate
  modified_base 17: mod_base = OTHER; note = 2'-O-methylguanosine-3'-phosphate
  modified_base 18: mod_base = OTHER; note = 2'-fluorocytidine-3'-phosphate
  modified_base 19: mod_base = OTHER; note = 2'-O-methylguanosine-3'-phosphorothioate
  modified_base 20: mod_base = OTHER; note = 2'-O-methylcytidine-3'-phosphorothioate
  modified_base 21: mod_base = OTHER; note = 2'-O-methylcytidine
aacaggagcagggaaagcgcc

SEQ ID NO: 1086 - RNA, 21 nt, synthetic construct
  source 1..21: mol_type = other RNA
  modified_base 1: mod_base = OTHER; note = 5'-phosphate-2'-O-methyluridine-3'-phosphorothioate
  modified_base 2: mod_base = OTHER; note = 2'-fluoroadenosine-3'-phosphorothioate
  modified_base 3: mod_base = OTHER; note = 2'-O-methyladenosine-3'-phosphate
  modified_base 4: mod_base = OTHER; note = 2'-fluorocytidine-3'-phosphate
  modified_base 5: mod_base = OTHER; note = 2'-O-methyladenosine-3'-phosphate
  modified_base 6: mod_base = OTHER; note = 2'-fluoroguanosine-3'-phosphate
  modified_base 7: mod_base = OTHER; note = 2'-O-methylguanosine-3'-phosphate
  modified_base 8: mod_base = OTHER; note = 2'-fluoroadenosine-3'-phosphate
  modified_base 9: mod_base = OTHER; note = 2'-O-methylguanosine-3'-phosphate
  modified_base 10: mod_base = OTHER; note = 2'-fluorocytidine-3'-phosphate
  modified_base 11: mod_base = OTHER; note = 2'-O-methyladenosine-3'-phosphate
  modified_base 12: mod_base = OTHER; note = 2'-fluoroguanosine-3'-phosphate
  modified_base 13: mod_base = OTHER; note = 2'-O-methylguanosine-3'-phosphate
  modified_base 14: mod_base = OTHER; note = 2'-fluoroguanosine-3'-phosphate
  modified_base 15: mod_base = OTHER; note = 2'-O-methyladenosine-3'-phosphate
  modified_base 16: mod_base = OTHER; note = 2'-fluoroadenosine-3'-phosphate
  modified_base 17: mod_base = OTHER; note = 2'-O-methyladenosine-3'-phosphate
  modified_base 18: mod_base = OTHER; note = 2'-fluoroguanosine-3'-phosphate
  modified_base 19: mod_base = OTHER; note = 2'-O-methylcytidine-3'-phosphorothioate
  modified_base 20: mod_base = OTHER; note = 2'-O-methylguanosine-3'-phosphorothioate
  modified_base 21: mod_base = OTHER; note = 2'-O-methylcytidine
taacaggagcagggaaagcgc

SEQ ID NO: 1087 - RNA, 21 nt, synthetic construct
  source 1..21: mol_type = other RNA
  modified_base 1: mod_base = OTHER; note = 5'-phosphate-2'-O-methyluridine-3'-phosphorothioate
  modified_base 2: mod_base = OTHER; note = 2'-fluoroadenosine-3'-phosphorothioate
  modified_base 3: mod_base = OTHER; note = 2'-O-methyladenosine-3'-phosphate
  modified_base 4: mod_base = OTHER; note = 2'-fluorocytidine-3'-phosphate
  modified_base 5: mod_base = OTHER; note = 2'-O-methylguanosine-3'-phosphate
  modified_base 6: mod_base = OTHER; note = 2'-fluoroguanosine-3'-phosphate
  modified_base 7: mod_base = OTHER; note = 2'-O-methylcytidine-3'-phosphate
  modified_base 8: mod_base = OTHER; note = 2'-fluoroguanosine-3'-phosphate
  modified_base 9: mod_base = OTHER; note = 2'-O-methyladenosine-3'-phosphate
  modified_base 10: mod_base = OTHER; note = 2'-fluoroadenosine-3'-phosphate
  modified_base 11: mod_base = OTHER; note = 2'-O-methylcytidine-3'-phosphate
  modified_base 12: mod_base = OTHER; note = 2'-fluoroadenosine-3'-phosphate
  modified_base 13: mod_base = OTHER; note = 2'-O-methylguanosine-3'-phosphate
  modified_base 14: mod_base = OTHER; note = 2'-fluoroguanosine-3'-phosphate
  modified_base 15: mod_base = OTHER; note = 2'-O-methyladenosine-3'-phosphate
  modified_base 16: mod_base = OTHER; note = 2'-fluoroguanosine-3'-phosphate
  modified_base 17: mod_base = OTHER; note = 2'-O-methylcytidine-3'-phosphate
  modified_base 18: mod_base = OTHER; note = 2'-fluoroadenosine-3'-phosphate
  modified_base 19: mod_base = OTHER; note = 2'-O-methylguanosine-3'-phosphorothioate
  modified_base 20: mod_base = OTHER; note = 2'-O-methylguanosine-3'-phosphorothioate
  modified_base 21: mod_base = OTHER; note = 2'-O-methylguanosine
taacggcgaacaggagcaggg

SEQ ID NO: 1088 - RNA, 21 nt, synthetic construct
  source 1..21: mol_type = other RNA
  modified_base 1: mod_base = OTHER; note = 5'-phosphate-2'-O-methyladenosine-3'-phosphorothioate
  modified_base 2: mod_base = OTHER; note = 2'-fluoroadenosine-3'-phosphorothioate
  modified_base 3: mod_base = OTHER; note = 2'-O-methylcytidine-3'-phosphate
  modified_base 4: mod_base = OTHER; note = 2'-fluorouridine-3'-phosphate
  modified_base 5: mod_base = OTHER; note = 2'-O-methylguanosine-3'-phosphate
  modified_base 6: mod_base = OTHER; note = 2'-fluorocytidine-3'-phosphate
  modified_base 7: mod_base = OTHER; note = 2'-O-methylguanosine-3'-phosphate
  modified_base 8: mod_base = OTHER; note = 2'-fluoroguanosine-3'-phosphate
  modified_base 9: mod_base = OTHER; note = 2'-O-methyluridine-3'-phosphate
  modified_base 10: mod_base = OTHER; note = 2'-fluoroguanosine-3'-phosphate
  modified_base 11: mod_base = OTHER; note = 2'-O-methyladenosine-3'-phosphate
  modified_base 12: mod_base = OTHER; note = 2'-fluoroguanosine-3'-phosphate
  modified_base 13: mod_base = OTHER; note = 2'-O-methyluridine-3'-phosphate
  modified_base 14: mod_base = OTHER; note = 2'-fluorouridine-3'-phosphate
  modified_base 15: mod_base = OTHER; note = 2'-O-methylguanosine-3'-phosphate
  modified_base 16: mod_base = OTHER; note = 2'-fluoroguanosine-3'-phosphate
  modified_base 17: mod_base = OTHER; note = 2'-O-methylcytidine-3'-phosphate
  modified_base 18: mod_base = OTHER; note = 2'-fluorocytidine-3'-phosphate
  modified_base 19: mod_base = OTHER; note = 2'-O-methylguanosine-3'-phosphorothioate
  modified_base 20: mod_base = OTHER; note = 2'-O-methylguanosine-3'-phosphorothioate
  modified_base 21: mod_base = OTHER; note = 2'-O-methylcytidine
aactgcggtgagttggccggc

SEQ ID NO: 1089 - RNA, 21 nt, synthetic construct
  source 1..21: mol_type = other RNA
  modified_base 1: mod_base = OTHER; note = 5'-phosphate-2'-O-methyladenosine-3'-phosphorothioate
  modified_base 2: mod_base = OTHER; note = 2'-fluoroadenosine-3'-phosphorothioate
  modified_base 3: mod_base = OTHER; note = 2'-O-methylguanosine-3'-phosphate
  modified_base 4: mod_base = OTHER; note = 2'-fluoroadenosine-3'-phosphate
  modified_base 5: mod_base = OTHER; note = 2'-O-methylcytidine-3'-phosphate
  modified_base 6: mod_base = OTHER; note = 2'-fluorouridine-3'-phosphate
  modified_base 7: mod_base = OTHER; note = 2'-O-methylguanosine-3'-phosphate
  modified_base 8: mod_base = OTHER; note = 2'-fluorocytidine-3'-phosphate
  modified_base 9: mod_base = OTHER; note = 2'-O-methylguanosine-3'-phosphate
  modified_base 10: mod_base = OTHER; note = 2'-fluoroguanosine-3'-phosphate
  modified_base 11: mod_base = OTHER; note = 2'-O-methyluridine-3'-phosphate
  modified_base 12: mod_base = OTHER; note = 2'-fluoroguanosine-3'-phosphate
  modified_base 13: mod_base = OTHER; note = 2'-O-methyladenosine-3'-phosphate
  modified_base 14: mod_base = OTHER; note = 2'-fluoroguanosine-3'-phosphate
  modified_base 15: mod_base = OTHER; note = 2'-O-methyluridine-3'-phosphate
  modified_base 16: mod_base = OTHER; note = 2'-fluorouridine-3'-phosphate
  modified_base 17: mod_base = OTHER; note = 2'-O-methylguanosine-3'-phosphate
  modified_base 18: mod_base = OTHER; note = 2'-fluoroguanosine-3'-phosphate
  modified_base 19: mod_base = OTHER; note = 2'-O-methylcytidine-3'-phosphorothioate
  modified_base 20: mod_base = OTHER; note = 2'-O-methylcytidine-3'-phosphorothioate
  modified_base 21: mod_base = OTHER; note = 2'-O-methylguanosine
aagactgcggtgagttggccg

SEQ ID NO: 1090 - RNA, 21 nt, synthetic construct
  source 1..21: mol_type = other RNA
  modified_base 1: mod_base = OTHER; note = 5'-phosphate-2'-O-methyluridine-3'-phosphorothioate
  modified_base 2: mod_base = OTHER; note = 2'-fluorouridine-3'-phosphorothioate
  modified_base 3: mod_base = OTHER; note = 2'-O-methylcytidine-3'-phosphate
  modified_base 4: mod_base = OTHER; note = 2'-fluorouridine-3'-phosphate
  modified_base 5: mod_base = OTHER; note = 2'-O-methyladenosine-3'-phosphate
  modified_base 6: mod_base = OTHER; note = 2'-fluoroguanosine-3'-phosphate
  modified_base 7: mod_base = OTHER; note = 2'-O-methylguanosine-3'-phosphate
  modified_base 8: mod_base = OTHER; note = 2'-fluoroguanosine-3'-phosphate
  modified_base 9: mod_base = OTHER; note = 2'-O-methyluridine-3'-phosphate
  modified_base 10: mod_base = OTHER; note = 2'-fluorouridine-3'-phosphate
  modified_base 11: mod_base = OTHER; note = 2'-O-methylcytidine-3'-phosphate
  modified_base 12: mod_base = OTHER; note = 2'-fluoroadenosine-3'-phosphate
  modified_base 13: mod_base = OTHER; note = 2'-O-methylguanosine-3'-phosphate
  modified_base 14: mod_base = OTHER; note = 2'-fluoroguanosine-3'-phosphate
  modified_base 15: mod_base = OTHER; note = 2'-O-methylguanosine-3'-phosphate
  modified_base 16: mod_base = OTHER; note = 2'-fluoroadenosine-3'-phosphate
  modified_base 17: mod_base = OTHER; note = 2'-O-methylguanosine-3'-phosphate
  modified_base 18: mod_base = OTHER; note = 2'-fluorocytidine-3'-phosphate
  modified_base 19: mod_base = OTHER; note = 2'-O-methylguanosine-3'-phosphorothioate
  modified_base 20: mod_base = OTHER; note = 2'-O-methylcytidine-3'-phosphorothioate
  modified_base 21: mod_base = OTHER; note = 2'-O-methylguanosine
ttctagggttcagggagcgcg

SEQ ID NO: 1091 - RNA, 21 nt, synthetic construct
  source 1..21: mol_type = other RNA
  modified_base 1: mod_base = OTHER; note = 5'-phosphate-2'-O-methyladenosine-3'-phosphorothioate
  modified_base 2: mod_base = OTHER; note = 2'-fluorouridine-3'-phosphorothioate
  modified_base 3: mod_base = OTHER; note = 2'-O-methyluridine-3'-phosphate
  modified_base 4: mod_base = OTHER; note = 2'-fluorocytidine-3'-phosphate
  modified_base 5: mod_base = OTHER; note = 2'-O-methyluridine-3'-phosphate
  modified_base 6: mod_base = OTHER; note = 2'-fluoroadenosine-3'-phosphate
  modified_base 7: mod_base = OTHER; note = 2'-O-methylguanosine-3'-phosphate
  modified_base 8: mod_base = OTHER; note = 2'-fluoroguanosine-3'-phosphate
  modified_base 9: mod_base = OTHER; note = 2'-O-methylguanosine-3'-phosphate
  modified_base 10: mod_base = OTHER; note = 2'-fluorouridine-3'-phosphate
  modified_base 11: mod_base = OTHER; note = 2'-O-methyluridine-3'-phosphate
  modified_base 12: mod_base = OTHER; note = 2'-fluorocytidine-3'-phosphate
  modified_base 13: mod_base = OTHER; note = 2'-O-methyladenosine-3'-phosphate
  modified_base 14: mod_base = OTHER; note = 2'-fluoroguanosine-3'-phosphate
  modified_base 15: mod_base = OTHER; note = 2'-O-methylguanosine-3'-phosphate
  modified_base 16: mod_base = OTHER; note = 2'-fluoroguanosine-3'-phosphate
  modified_base 17: mod_base = OTHER; note = 2'-O-methyladenosine-3'-phosphate
  modified_base 18: mod_base = OTHER; note = 2'-fluoroguanosine-3'-phosphate
  modified_base 19: mod_base = OTHER; note = 2'-O-methylcytidine-3'-phosphorothioate
  modified_base 20: mod_base = OTHER; note = 2'-O-methylguanosine-3'-phosphorothioate
  modified_base 21: mod_base = OTHER; note = 2'-O-methylcytidine
attctagggttcagggagcgc

SEQ ID NO: 1092 - RNA, 21 nt, synthetic construct
  source 1..21: mol_type = other RNA
  modified_base 1: mod_base = OTHER; note = 5'-phosphate-2'-O-methylguanosine-3'-phosphorothioate
  modified_base 2: mod_base = OTHER; note = 2'-fluoroadenosine-3'-phosphorothioate
  modified_base 3: mod_base = OTHER; note = 2'-O-methylcytidine-3'-phosphate
  modified_base 4: mod_base = OTHER; note = 2'-fluoroadenosine-3'-phosphate
  modified_base 5: mod_base = OTHER; note = 2'-O-methylguanosine-3'-phosphate
  modified_base 6: mod_base = OTHER; note = 2'-fluorouridine-3'-phosphate
  modified_base 7: mod_base = OTHER; note = 2'-O-methyluridine-3'-phosphate
  modified_base 8: mod_base = OTHER; note = 2'-fluorocytidine-3'-phosphate
  modified_base 9: mod_base = OTHER; note = 2'-O-methyluridine-3'-phosphate
  modified_base 10: mod_base = OTHER; note = 2'-fluoroadenosine-3'-phosphate
  modified_base 11: mod_base = OTHER; note = 2'-O-methylguanosine-3'-phosphate
  modified_base 12: mod_base = OTHER; note = 2'-fluoroguanosine-3'-phosphate
  modified_base 13: mod_base = OTHER; note = 2'-O-methylguanosine-3'-phosphate
  modified_base 14: mod_base = OTHER; note = 2'-fluorouridine-3'-phosphate
  modified_base 15: mod_base = OTHER; note = 2'-O-methyluridine-3'-phosphate
  modified_base 16: mod_base = OTHER; note = 2'-fluorocytidine-3'-phosphate
  modified_base 17: mod_base = OTHER; note = 2'-O-methyladenosine-3'-phosphate
  modified_base 18: mod_base = OTHER; note = 2'-fluoroguanosine-3'-phosphate
  modified_base 19: mod_base = OTHER; note = 2'-O-methylguanosine-3'-phosphorothioate
  modified_base 20: mod_base = OTHER; note = 2'-O-methylguanosine-3'-phosphorothioate
  modified_base 21: mod_base = OTHER; note = 2'-O-methyladenosine
gacagttctagggttcaggga

SEQ ID NO: 1093 - RNA, 21 nt, synthetic construct
  source 1..21: mol_type = other RNA
  modified_base 1: mod_base = OTHER; note = 5'-phosphate-2'-O-methyladenosine-3'-phosphorothioate
  modified_base 2: mod_base = OTHER; note = 2'-fluoroguanosine-3'-phosphorothioate
  modified_base 3: mod_base = OTHER; note = 2'-O-methyladenosine-3'-phosphate
  modified_base 4: mod_base = OTHER; note = 2'-fluorocytidine-3'-phosphate
  modified_base 5: mod_base = OTHER; note = 2'-O-methyladenosine-3'-phosphate
  modified_base 6: mod_base = OTHER; note = 2'-fluoroguanosine-3'-phosphate
  modified_base 7: mod_base = OTHER; note = 2'-O-methyluridine-3'-phosphate
  modified_base 8: mod_base = OTHER; note = 2'-fluorouridine-3'-phosphate
  modified_base 9: mod_base = OTHER; note = 2'-O-methylcytidine-3'-phosphate
  modified_base 10: mod_base = OTHER; note = 2'-fluorouridine-3'-phosphate
  modified_base 11: mod_base = OTHER; note = 2'-O-methyladenosine-3'-phosphate
  modified_base 12: mod_base = OTHER; note = 2'-fluoroguanosine-3'-phosphate
  modified_base 13: mod_base = OTHER; note = 2'-O-methylguanosine-3'-phosphate
  modified_base 14: mod_base = OTHER; note = 2'-fluoroguanosine-3'-phosphate
  modified_base 15: mod_base = OTHER; note = 2'-O-methyluridine-3'-phosphate
  modified_base 16: mod_base = OTHER; note = 2'-fluorouridine-3'-phosphate
  modified_base 17: mod_base = OTHER; note = 2'-O-methylcytidine-3'-phosphate
  modified_base 18: mod_base = OTHER; note = 2'-fluoroadenosine-3'-phosphate
  modified_base 19: mod_base = OTHER; note = 2'-O-methylguanosine-3'-phosphorothioate
  modified_base 20: mod_base = OTHER; note = 2'-O-methylguanosine-3'-phosphorothioate
  modified_base 21: mod_base = OTHER; note = 2'-O-methylguanosine
agacagttctagggttcaggg

SEQ ID NO: 1094 - RNA, 21 nt, synthetic construct
  source 1..21: mol_type = other RNA
  modified_base 1: mod_base = OTHER; note = 5'-phosphate-2'-O-methyladenosine-3'-phosphorothioate
  modified_base 2: mod_base = OTHER; note = 2'-fluoroadenosine-3'-phosphorothioate
  modified_base 3: mod_base = OTHER; note = 2'-O-methylguanosine-3'-phosphate
  modified_base 4: mod_base = OTHER; note = 2'-fluoroadenosine-3'-phosphate
  modified_base 5: mod_base = OTHER; note = 2'-O-methylcytidine-3'-phosphate
  modified_base 6: mod_base = OTHER; note = 2'-fluoroadenosine-3'-phosphate
  modified_base 7: mod_base = OTHER; note = 2'-O-methylguanosine-3'-phosphate
  modified_base 8: mod_base = OTHER; note = 2'-fluorouridine-3'-phosphate
  modified_base 9: mod_base = OTHER; note = 2'-O-methyluridine-3'-phosphate
  modified_base 10: mod_base = OTHER; note = 2'-fluorocytidine-3'-phosphate
  modified_base 11: mod_base = OTHER; note = 2'-O-methyluridine-3'-phosphate
  modified_base 12: mod_base = OTHER; note = 2'-fluoroadenosine-3'-phosphate
  modified_base 13: mod_base = OTHER; note = 2'-O-methylguanosine-3'-phosphate
  modified_base 14: mod_base = OTHER; note = 2'-fluoroguanosine-3'-phosphate
  modified_base 15: mod_base = OTHER; note = 2'-O-methylguanosine-3'-phosphate
  modified_base 16: mod_base = OTHER; note = 2'-fluorouridine-3'-phosphate
  modified_base 17: mod_base = OTHER; note = 2'-O-methyluridine-3'-phosphate
  modified_base 18: mod_base = OTHER; note = 2'-fluorocytidine-3'-phosphate
  modified_base 19: mod_base = OTHER; note = 2'-O-methyladenosine-3'-phosphorothioate
  modified_base 20: mod_base = OTHER; note = 2'-O-methylguanosine-3'-phosphorothioate
  modified_base 21: mod_base = OTHER; note = 2'-O-methylguanosine
aagacagttctagggttcagg

SEQ ID NO: 1095 - RNA, 21 nt, synthetic construct
  source 1..21: mol_type = other RNA
  modified_base 1: mod_base = OTHER; note = 5'-phosphate-2'-O-methyladenosine-3'-phosphorothioate
  modified_base 2: mod_base = OTHER; note = 2'-fluoroadenosine-3'-phosphorothioate
  modified_base 3: mod_base = OTHER; note = 2'-O-methyladenosine-3'-phosphate
  modified_base 4: mod_base = OTHER; note = 2'-fluoroguanosine-3'-phosphate
  modified_base 5: mod_base = OTHER; note = 2'-O-methyladenosine-3'-phosphate
  modified_base 6: mod_base = OTHER; note = 2'-fluorocytidine-3'-phosphate
  modified_base 7: mod_base = OTHER; note = 2'-O-methyladenosine-3'-phosphate
  modified_base 8: mod_base = OTHER; note = 2'-fluoroguanosine-3'-phosphate
  modified_base 9: mod_base = OTHER; note = 2'-O-methyluridine-3'-phosphate
  modified_base 10: mod_base = OTHER; note = 2'-fluorouridine-3'-phosphate
  modified_base 11: mod_base = OTHER; note = 2'-O-methylcytidine-3'-phosphate
  modified_base 12: mod_base = OTHER; note = 2'-fluorouridine-3'-phosphate
  modified_base 13: mod_base = OTHER; note = 2'-O-methyladenosine-3'-phosphate
  modified_base 14: mod_base = OTHER; note = 2'-fluoroguanosine-3'-phosphate
  modified_base 15: mod_base = OTHER; note = 2'-O-methylguanosine-3'-phosphate
  modified_base 16: mod_base = OTHER; note = 2'-fluoroguanosine-3'-phosphate
  modified_base 17: mod_base = OTHER; note = 2'-O-methyluridine-3'-phosphate
  modified_base 18: mod_base = OTHER; note = 2'-fluorouridine-3'-phosphate
  modified_base 19: mod_base = OTHER; note = 2'-O-methylcytidine-3'-phosphorothioate
  modified_base 20: mod_base = OTHER; note = 2'-O-methyladenosine-3'-phosphorothioate
  modified_base 21: mod_base = OTHER; note = 2'-O-methylguanosine
aaagacagttctagggttcag

SEQ ID NO: 1096 - RNA, 21 nt, synthetic construct
  source 1..21: mol_type = other RNA
  modified_base 1: mod_base = OTHER; note = 5'-phosphate-2'-O-methyladenosine-3'-phosphorothioate
  modified_base 2: mod_base = OTHER; note = 2'-fluoroguanosine-3'-phosphorothioate
  modified_base 3: mod_base = OTHER; note = 2'-O-methyladenosine-3'-phosphate
  modified_base 4: mod_base = OTHER; note = 2'-fluoroadenosine-3'-phosphate
  modified_base 5: mod_base = OTHER; note = 2'-O-methylguanosine-3'-phosphate
  modified_base 6: mod_base = OTHER; note = 2'-fluoroadenosine-3'-phosphate
  modified_base 7: mod_base = OTHER; note = 2'-O-methylcytidine-3'-phosphate
  modified_base 8: mod_base = OTHER; note = 2'-fluoroadenosine-3'-phosphate
  modified_base 9: mod_base = OTHER; note = 2'-O-methylguanosine-3'-phosphate
  modified_base 10: mod_base = OTHER; note = 2'-fluorouridine-3'-phosphate
  modified_base 11: mod_base = OTHER; note = 2'-O-methyluridine-3'-phosphate
  modified_base 12: mod_base = OTHER; note = 2'-fluorocytidine-3'-phosphate
  modified_base 13: mod_base = OTHER; note = 2'-O-methyluridine-3'-phosphate
  modified_base 14: mod_base = OTHER; note = 2'-fluoroadenosine-3'-phosphate
  modified_base 15: mod_base = OTHER; note = 2'-O-methylguanosine-3'-phosphate
  modified_base 16: mod_base = OTHER; note = 2'-fluoroguanosine-3'-phosphate
  modified_base 17: mod_base = OTHER; note = 2'-O-methylguanosine-3'-phosphate
  modified_base 18: mod_base = OTHER; note = 2'-fluorouridine-3'-phosphate
  modified_base 19: mod_base = OTHER; note = 2'-O-methyluridine-3'-phosphorothioate
  modified_base 20: mod_base = OTHER; note = 2'-O-methylcytidine-3'-phosphorothioate
  modified_base 21: mod_base = OTHER; note = 2'-O-methyladenosine
agaagacagttctagggttca

SEQ ID NO: 1097 - RNA, 21 nt, synthetic construct
  source 1..21: mol_type = other RNA
  modified_base 1: mod_base = OTHER; note = 5'-phosphate-2'-O-methyluridine-3'-phosphorothioate
  modified_base 2: mod_base = OTHER; note = 2'-fluorocytidine-3'-phosphorothioate
  modified_base 3: mod_base = OTHER; note = 2'-O-methylguanosine-3'-phosphate
  modified_base 4: mod_base = OTHER; note = 2'-fluoroadenosine-3'-phosphate
  modified_base 5: mod_base = OTHER; note = 2'-O-methyladenosine-3'-phosphate
  modified_base 6: mod_base = OTHER; note = 2'-fluoroguanosine-3'-phosphate
  modified_base 7: mod_base = OTHER; note = 2'-O-methyladenosine-3'-phosphate
  modified_base 8: mod_base = OTHER; note = 2'-fluorocytidine-3'-phosphate
  modified_base 9: mod_base = OTHER; note = 2'-O-methyladenosine-3'-phosphate
  modified_base 10: mod_base = OTHER; note = 2'-fluoroguanosine-3'-phosphate
  modified_base 11: mod_base = OTHER; note = 2'-O-methyluridine-3'-phosphate
  modified_base 12: mod_base = OTHER; note = 2'-fluorouridine-3'-phosphate
  modified_base 13: mod_base = OTHER; note = 2'-O-methylcytidine-3'-phosphate
  modified_base 14: mod_base = OTHER; note = 2'-fluorouridine-3'-phosphate
  modified_base 15: mod_base = OTHER; note = 2'-O-methyladenosine-3'-phosphate
  modified_base 16: mod_base = OTHER; note = 2'-fluoroguanosine-3'-phosphate
  modified_base 17: mod_base = OTHER; note = 2'-O-methylguanosine-3'-phosphate
  modified_base 18: mod_base = OTHER; note = 2'-fluoroguanosine-3'-phosphate
  modified_base 19: mod_base = OTHER; note = 2'-O-methyluridine-3'-phosphorothioate
  modified_base 20: mod_base = OTHER; note = 2'-O-methyluridine-3'-phosphorothioate
  modified_base 21: mod_base = OTHER; note = 2'-O-methylcytidine
tcgaagacagttctagggttc

SEQ ID NO: 1098 - RNA, 21 nt, synthetic construct
  source 1..21: mol_type = other RNA
  modified_base 1: mod_base = OTHER; note = 5'-phosphate-2'-O-methyladenosine-3'-phosphorothioate
  modified_base 2: mod_base = OTHER; note = 2'-fluorouridine-3'-phosphorothioate
  modified_base 3: mod_base = OTHER; note = 2'-O-methylcytidine-3'-phosphate
  modified_base 4: mod_base = OTHER; note = 2'-fluoroguanosine-3'-phosphate
  modified_base 5: mod_base = OTHER; note = 2'-O-methyladenosine-3'-phosphate
  modified_base 6: mod_base = OTHER; note = 2'-fluoroadenosine-3'-phosphate
  modified_base 7: mod_base = OTHER; note = 2'-O-methylguanosine-3'-phosphate
  modified_base 8: mod_base = OTHER; note = 2'-fluoroadenosine-3'-phosphate
  modified_base 9: mod_base = OTHER; note = 2'-O-methylcytidine-3'-phosphate
  modified_base 10: mod_base = OTHER; note = 2'-fluoroadenosine-3'-phosphate
  modified_base 11: mod_base = OTHER; note = 2'-O-methylguanosine-3'-phosphate
  modified_base 12: mod_base = OTHER; note = 2'-fluorouridine-3'-phosphate
  modified_base 13: mod_base = OTHER; note = 2'-O-methyluridine-3'-phosphate
  modified_base 14: mod_base = OTHER; note = 2'-fluorocytidine-3'-phosphate
  modified_base 15: mod_base = OTHER; note = 2'-O-methyluridine-3'-phosphate
  modified_base 16: mod_base = OTHER; note = 2'-fluoroadenosine-3'-phosphate
  modified_base 17: mod_base = OTHER; note = 2'-O-methylguanosine-3'-phosphate
  modified_base 18: mod_base = OTHER; note = 2'-fluoroguanosine-3'-phosphate
  modified_base 19: mod_base = OTHER; note = 2'-O-methylguanosine-3'-phosphorothioate
  modified_base 20: mod_base = OTHER; note = 2'-O-methyluridine-3'-phosphorothioate
  modified_base 21: mod_base = OTHER; note = 2'-O-methyluridine
atcgaagacagttctagggtt

SEQ ID NO: 1099 - RNA, 21 nt, synthetic construct
  source 1..21: mol_type = other RNA
  modified_base 1: mod_base = OTHER; note = 5'-phosphate-2'-O-methyladenosine-3'-phosphorothioate
  modified_base 2: mod_base = OTHER; note = 2'-fluoroguanosine-3'-phosphorothioate
  modified_base 3: mod_base = OTHER; note = 2'-O-methyluridine-3'-phosphate
  modified_base 4: mod_base = OTHER; note = 2'-fluorocytidine-3'-phosphate
  modified_base 5: mod_base = OTHER; note = 2'-O-methylguanosine-3'-phosphate
  modified_base 6: mod_base = OTHER; note = 2'-fluoroadenosine-3'-phosphate
  modified_base 7: mod_base = OTHER; note = 2'-O-methyladenosine-3'-phosphate
  modified_base 8: mod_base = OTHER; note = 2'-fluoroguanosine-3'-phosphate
  modified_base 9: mod_base = OTHER; note = 2'-O-methyladenosine-3'-phosphate
  modified_base 10: mod_base = OTHER; note = 2'-fluorocytidine-3'-phosphate
  modified_base 11: mod_base = OTHER; note = 2'-O-methyladenosine-3'-phosphate
  modified_base 12: mod_base = OTHER; note = 2'-fluoroguanosine-3'-phosphate
  modified_base 13: mod_base = OTHER; note = 2'-O-methyluridine-3'-phosphate
  modified_base 14: mod_base = OTHER; note = 2'-fluorouridine-3'-phosphate
  modified_base 15: mod_base = OTHER; note = 2'-O-methylcytidine-3'-phosphate
  modified_base 16: mod_base = OTHER; note = 2'-fluorouridine-3'-phosphate
  modified_base 17: mod_base = OTHER; note = 2'-O-methyladenosine-3'-phosphate
  modified_base 18: mod_base = OTHER; note = 2'-fluoroguanosine-3'-phosphate
  modified_base 19: mod_base = OTHER; note = 2'-O-methylguanosine-3'-phosphorothioate
  modified_base 20: mod_base = OTHER; note = 2'-O-methylguanosine-3'-phosphorothioate
  modified_base 21: mod_base = OTHER; note = 2'-O-methyluridine
agtcgaagacagttctagggt

SEQ ID NO: 1100 - RNA, 21 nt, synthetic construct
  source 1..21: mol_type = other RNA
  modified_base 1: mod_base = OTHER; note = 5'-phosphate-2'-O-methyladenosine-3'-phosphorothioate
  modified_base 2: mod_base = OTHER; note = 2'-fluoroadenosine-3'-phosphorothioate
  modified_base 3: mod_base = OTHER; note = 2'-O-methylguanosine-3'-phosphate
  modified_base 4: mod_base = OTHER; note = 2'-fluorouridine-3'-phosphate
  modified_base 5: mod_base = OTHER; note = 2'-O-methylcytidine-3'-phosphate
  modified_base 6: mod_base = OTHER; note = 2'-fluoroguanosine-3'-phosphate
  modified_base 7: mod_base = OTHER; note = 2'-O-methyladenosine-3'-phosphate
  modified_base 8: mod_base = OTHER; note = 2'-fluoroadenosine-3'-phosphate
  modified_base 9: mod_base = OTHER; note = 2'-O-methylguanosine-3'-phosphate
  modified_base 10: mod_base = OTHER; note = 2'-fluoroadenosine-3'-phosphate
  modified_base 11: mod_base = OTHER; note = 2'-O-methylcytidine-3'-phosphate
  modified_base 12: mod_base = OTHER; note = 2'-fluoroadenosine-3'-phosphate
  modified_base 13: mod_base = OTHER; note = 2'-O-methylguanosine-3'-phosphate
  modified_base 14: mod_base = OTHER; note = 2'-fluorouridine-3'-phosphate
  modified_base 15: mod_base = OTHER; note = 2'-O-methyluridine-3'-phosphate
  modified_base 16: mod_base = OTHER; note = 2'-fluorocytidine-3'-phosphate
  modified_base 17: mod_base = OTHER; note = 2'-O-methyluridine-3'-phosphate
  modified_base 18: mod_base = OTHER; note = 2'-fluoroadenosine-3'-phosphate
  modified_base 19: mod_base = OTHER; note = 2'-O-methylguanosine-3'-phosphorothioate
  modified_base 20: mod_base = OTHER; note = 2'-O-methylguanosine-3'-phosphorothioate
  modified_base 21: mod_base = OTHER; note = 2'-O-methylguanosine
aagtcgaagacagttctaggg

SEQ ID NO: 1101 - RNA, 21 nt, synthetic construct
  source 1..21: mol_type = other RNA
  modified_base 1: mod_base = OTHER; note = 5'-phosphate-2'-O-methyladenosine-3'-phosphorothioate
  modified_base 2: mod_base = OTHER; note = 2'-fluorouridine-3'-phosphorothioate
  modified_base 3: mod_base = OTHER; note = 2'-O-methylcytidine-3'-phosphate
  modified_base 4: mod_base = OTHER; note = 2'-fluoroadenosine-3'-phosphate
  modified_base 5: mod_base = OTHER; note = 2'-O-methylcytidine-3'-phosphate
  modified_base 6: mod_base = OTHER; note = 2'-fluoroadenosine-3'-phosphate
  modified_base 7: mod_base = OTHER; note = 2'-O-methylguanosine-3'-phosphate
  modified_base 8: mod_base = OTHER; note = 2'-fluoroguanosine-3'-phosphate
  modified_base 9: mod_base = OTHER; note = 2'-O-methyladenosine-3'-phosphate
  modified_base 10: mod_base = OTHER; note = 2'-fluorocytidine-3'-phosphate
  modified_base 11: mod_base = OTHER; note = 2'-O-methyluridine-3'-phosphate
  modified_base 12: mod_base = OTHER; note = 2'-fluoroguanosine-3'-phosphate
  modified_base 13: mod_base = OTHER; note = 2'-O-methylguanosine-3'-phosphate
  modified_base 14: mod_base = OTHER; note = 2'-fluoroadenosine-3'-phosphate
  modified_base 15: mod_base = OTHER; note = 2'-O-methylguanosine-3'-phosphate
  modified_base 16: mod_base = OTHER; note = 2'-fluorocytidine-3'-phosphate
  modified_base 17: mod_base = OTHER; note = 2'-O-methyluridine-3'-phosphate
  modified_base 18: mod_base = OTHER; note = 2'-fluoroguanosine-3'-phosphate
  modified_base 19: mod_base = OTHER; note = 2'-O-methylguanosine-3'-phosphorothioate
  modified_base 20: mod_base = OTHER; note = 2'-O-methylguanosine-3'-phosphorothioate
  modified_base 21: mod_base = OTHER; note = 2'-O-methylcytidine
atcacaggactggagctgggc

SEQ ID NO: 1102 - RNA, 21 nt, synthetic construct
  source 1..21: mol_type = other RNA
  modified_base 1: mod_base = OTHER; note = 5'-phosphate-2'-O-methyladenosine-3'-phosphorothioate
  modified_base 2: mod_base = OTHER; note = 2'-fluoroadenosine-3'-phosphorothioate
  modified_base 3: mod_base = OTHER; note = 2'-O-methyluridine-3'-phosphate
  modified_base 4: mod_base = OTHER; note = 2'-fluorocytidine-3'-phosphate
  modified_base 5: mod_base = OTHER; note = 2'-O-methyladenosine-3'-phosphate
  modified_base 6: mod_base = OTHER; note = 2'-fluorocytidine-3'-phosphate
  modified_base 7: mod_base = OTHER; note = 2'-O-methyladenosine-3'-phosphate
  modified_base 8: mod_base = OTHER; note = 2'-fluoroguanosine-3'-phosphate
  modified_base 9: mod_base = OTHER; note = 2'-O-methylguanosine-3'-phosphate
  modified_base 10: mod_base = OTHER; note = 2'-fluoroadenosine-3'-phosphate
  modified_base 11: mod_base = OTHER; note = 2'-O-methylcytidine-3'-phosphate
  modified_base 12: mod_base = OTHER; note = 2'-fluorouridine-3'-phosphate
  modified_base 13: mod_base = OTHER; note = 2'-O-methylguanosine-3'-phosphate
  modified_base 14: mod_base = OTHER; note = 2'-fluoroguanosine-3'-phosphate
  modified_base 15: mod_base = OTHER; note = 2'-O-methyladenosine-3'-phosphate
  modified_base 16: mod_base = OTHER; note = 2'-fluoroguanosine-3'-phosphate
  modified_base 17: mod_base = OTHER; note = 2'-O-methylcytidine-3'-phosphate
  modified_base 18: mod_base = OTHER; note = 2'-fluorouridine-3'-phosphate
  modified_base 19: mod_base = OTHER; note = 2'-O-methylguanosine-3'-phosphorothioate
  modified_base 20: mod_base = OTHER; note = 2'-O-methylguanosine-3'-phosphorothioate
  modified_base 21: mod_base = OTHER; note = 2'-O-methylguanosine
aatcacaggactggagctggg

SEQ ID NO: 1103 - RNA, 21 nt, synthetic construct
  source 1..21: mol_type = other RNA
  modified_base 1: mod_base = OTHER; note = 5'-phosphate-2'-O-methyladenosine-3'-phosphorothioate
  modified_base 2: mod_base = OTHER; note = 2'-fluoroadenosine-3'-phosphorothioate
  modified_base 3: mod_base = OTHER; note = 2'-O-methylguanosine-3'-phosphate
  modified_base 4: mod_base = OTHER; note = 2'-fluorocytidine-3'-phosphate
  modified_base 5: mod_base = OTHER; note = 2'-O-methyladenosine-3'-phosphate
  modified_base 6: mod_base = OTHER; note = 2'-fluorouridine-3'-phosphate
  modified_base 7: mod_base = OTHER; note = 2'-O-methyluridine-3'-phosphate
  modified_base 8: mod_base = OTHER; note = 2'-fluorocytidine-3'-phosphate
  modified_base 9: mod_base = OTHER; note = 2'-O-methylcytidine-3'-phosphate
  modified_base 10: mod_base = OTHER; note = 2'-fluorocytidine-3'-phosphate
  modified_base 11: mod_base = OTHER; note = 2'-O-methylguanosine-3'-phosphate
  modified_base 12: mod_base = OTHER; note = 2'-fluoroguanosine-3'-phosphate
  modified_base 13: mod_base = OTHER; note = 2'-O-methylcytidine-3'-phosphate
  modified_base 14: mod_base = OTHER; note = 2'-fluorouridine-3'-phosphate
  modified_base 15: mod_base = OTHER; note = 2'-O-methyladenosine-3'-phosphate
  modified_base 16: mod_base = OTHER; note = 2'-fluorocytidine-3'-phosphate
  modified_base 17: mod_base = OTHER; note = 2'-O-methyladenosine-3'-phosphate
  modified_base 18: mod_base = OTHER; note = 2'-fluoroadenosine-3'-phosphate
  modified_base 19: mod_base = OTHER; note = 2'-O-methylguanosine-3'-phosphorothioate
  modified_base 20: mod_base = OTHER; note = 2'-O-methylguanosine-3'-phosphorothioate
  modified_base 21: mod_base = OTHER; note = 2'-O-methyladenosine
aagcattcccggctacaagga

SEQ ID NO: 1104 - RNA, 21 nt, synthetic construct
  source 1..21: mol_type = other RNA
  modified_base 1: mod_base = OTHER; note = 5'-phosphate-2'-O-methyladenosine-3'-phosphorothioate
  modified_base 2: mod_base = OTHER; note = 2'-fluorocytidine-3'-phosphorothioate
  modified_base 3: mod_base = OTHER; note = 2'-O-methyladenosine-3'-phosphate
  modified_base 4: mod_base = OTHER; note = 2'-fluoroguanosine-3'-phosphate
  modified_base 5: mod_base = OTHER; note = 2'-O-methylcytidine-3'-phosphate
  modified_base 6: mod_base = OTHER; note = 2'-fluoroadenosine-3'-phosphate
  modified_base 7: mod_base = OTHER; note = 2'-O-methylguanosine-3'-phosphate
  modified_base 8: mod_base = OTHER; note = 2'-fluorocytidine-3'-phosphate
  modified_base 9: mod_base = OTHER; note = 2'-O-methyladenosine-3'-phosphate
  modified_base 10: mod_base = OTHER; note = 2'-fluorouridine-3'-phosphate
  modified_base 11: mod_base = OTHER; note = 2'-O-methyluridine-3'-phosphate
  modified_base 12: mod_base = OTHER; note = 2'-fluorocytidine-3'-phosphate
  modified_base 13: mod_base = OTHER; note = 2'-O-methylcytidine-3'-phosphate
  modified_base 14: mod_base = OTHER; note = 2'-fluorocytidine-3'-phosphate
  modified_base 15: mod_base = OTHER; note = 2'-O-methylguanosine-3'-phosphate
  modified_base 16: mod_base = OTHER; note = 2'-fluoroguanosine-3'-phosphate
  modified_base 17: mod_base = OTHER; note = 2'-O-methylcytidine-3'-phosphate
  modified_base 18: mod_base = OTHER; note = 2'-fluorouridine-3'-phosphate
  modified_base 19: mod_base = OTHER; note = 2'-O-methyladenosine-3'-phosphorothioate
  modified_base 20: mod_base = OTHER; note = 2'-O-methylcytidine-3'-phosphorothioate
  modified_base 21: mod_base = OTHER; note = 2'-O-methyladenosine
acagcagcattcccggctaca

SEQ ID NO: 1105 - RNA, 21 nt, synthetic construct
  source 1..21: mol_type = other RNA
  modified_base 1: mod_base = OTHER; note = 5'-phosphate-2'-O-methyluridine-3'-phosphorothioate
  modified_base 2: mod_base = OTHER; note = 2'-fluorouridine-3'-phosphorothioate
  modified_base 3: mod_base = OTHER; note = 2'-O-methylcytidine-3'-phosphate
  modified_base 4: mod_base = OTHER; note = 2'-fluoroadenosine-3'-phosphate
  modified_base 5: mod_base = OTHER; note = 2'-O-methylguanosine-3'-phosphate
  modified_base 6: mod_base = OTHER; note = 2'-fluorocytidine-3'-phosphate
  modified_base 7: mod_base = OTHER; note = 2'-O-methylcytidine-3'-phosphate
  modified_base 8: mod_base = OTHER; note = 2'-fluorouridine-3'-phosphate
  modified_base 9: mod_base = OTHER; note = 2'-O-methylguanosine-3'-phosphate
  modified_base 10: mod_base = OTHER; note = 2'-fluoroguanosine-3'-phosphate
  modified_base 11: mod_base = OTHER; note = 2'-O-methylcytidine-3'-phosphate
  modified_base 12: mod_base = OTHER; note = 2'-fluorocytidine-3'-phosphate
  modified_base 13: mod_base = OTHER; note = 2'-O-methylguanosine-3'-phosphate
  modified_base 14: mod_base = OTHER; note = 2'-fluoroadenosine-3'-phosphate
  modified_base 15: mod_base = OTHER; note = 2'-O-methyladenosine-3'-phosphate
  modified_base 16: mod_base = OTHER; note = 2'-fluoroadenosine-3'-phosphate
  modified_base 17: mod_base = OTHER; note = 2'-O-methylguanosine-3'-phosphate
  modified_base 18: mod_base = OTHER; note = 2'-fluoroadenosine-3'-phosphate
  modified_base 19: mod_base = OTHER; note = 2'-O-methyladenosine-3'-phosphorothioate
  modified_base 20: mod_base = OTHER; note = 2'-O-methyladenosine-3'-phosphorothioate
  modified_base 21: mod_base = OTHER; note = 2'-O-methylguanosine
ttcagcctggccgaaagaaag

SEQ ID NO: 1106 - RNA, 21 nt, synthetic construct
  source 1..21: mol_type = other RNA
  modified_base 1: mod_base = OTHER; note = 5'-phosphate-2'-O-methyladenosine-3'-phosphorothioate
  modified_base 2: mod_base = OTHER; note = 2'-fluorouridine-3'-phosphorothioate
  modified_base 3: mod_base = OTHER; note = 2'-O-methylcytidine-3'-phosphate
  modified_base 4: mod_base = OTHER; note = 2'-fluorocytidine-3'-phosphate
  modified_base 5: mod_base = OTHER; note = 2'-O-methyladenosine-3'-phosphate
  modified_base 6: mod_base = OTHER; note = 2'-fluorocytidine-3'-phosphate
  modified_base 7: mod_base = OTHER; note = 2'-O-methylguanosine-3'-phosphate
  modified_base 8: mod_base = OTHER; note = 2'-fluorouridine-3'-phosphate
  modified_base 9: mod_base = OTHER; note = 2'-O-methylcytidine-3'-phosphate
  modified_base 10: mod_base = OTHER; note = 2'-fluoroadenosine-3'-phosphate
  modified_base 11: mod_base = OTHER; note = 2'-O-methylguanosine-3'-phosphate
  modified_base 12: mod_base = OTHER; note = 2'-fluoroguanosine-3'-phosphate
  modified_base 13: mod_base = OTHER; note = 2'-O-methylguanosine-3'-phosphate
  modified_base 14: mod_base = OTHER; note = 2'-fluorocytidine-3'-phosphate
  modified_base 15: mod_base = OTHER; note = 2'-O-methylcytidine-3'-phosphate
  modified_base 16: mod_base = OTHER; note = 2'-fluorouridine-3'-phosphate
  modified_base 17: mod_base = OTHER; note = 2'-O-methylcytidine-3'-phosphate
  modified_base 18: mod_base = OTHER; note = 2'-fluoroadenosine-3'-phosphate
  modified_base 19: mod_base = OTHER; note = 2'-O-methylguanosine-3'-phosphorothioate
  modified_base 20: mod_base = OTHER; note = 2'-O-methylcytidine-3'-phosphorothioate
  modified_base 21: mod_base = OTHER; note = 2'-O-methylcytidine
atccacgtcagggcctcagcc

SEQ ID NO: 1107 - RNA, 21 nt, synthetic construct
  source 1..21: mol_type = other RNA
  modified_base 1: mod_base = OTHER; note = 5'-phosphate-2'-O-methyladenosine-3'-phosphorothioate
  modified_base 2: mod_base = OTHER; note = 2'-fluoroadenosine-3'-phosphorothioate
  modified_base 3: mod_base = OTHER; note = 2'-O-methyluridine-3'-phosphate
  modified_base 4: mod_base = OTHER; note = 2'-fluorocytidine-3'-phosphate
  modified_base 5: mod_base = OTHER; note = 2'-O-methylcytidine-3'-phosphate
  modified_base 6: mod_base = OTHER; note = 2'-fluoroadenosine-3'-phosphate
  modified_base 7: mod_base = OTHER; note = 2'-O-methylcytidine-3'-phosphate
  modified_base 8: mod_base = OTHER; note = 2'-fluoroguanosine-3'-phosphate
  modified_base 9: mod_base = OTHER; note = 2'-O-methyluridine-3'-phosphate
  modified_base 10: mod_base = OTHER; note = 2'-fluorocytidine-3'-phosphate
  modified_base 11: mod_base = OTHER; note = 2'-O-methyladenosine-3'-phosphate
  modified_base 12: mod_base = OTHER; note = 2'-fluoroguanosine-3'-phosphate
  modified_base 13: mod_base = OTHER; note = 2'-O-methylguanosine-3'-phosphate
  modified_base 14: mod_base = OTHER; note = 2'-fluoroguanosine-3'-phosphate
  modified_base 15: mod_base = OTHER; note = 2'-O-methylcytidine-3'-phosphate
  modified_base 16: mod_base = OTHER; note = 2'-fluorocytidine-3'-phosphate
  modified_base 17: mod_base = OTHER; note = 2'-O-methyluridine-3'-phosphate
  modified_base 18: mod_base = OTHER; note = 2'-fluorocytidine-3'-phosphate
  modified_base 19: mod_base = OTHER; note = 2'-O-methyladenosine-3'-phosphorothioate
  modified_base 20: mod_base = OTHER; note = 2'-O-methylguanosine-3'-phosphorothioate
  modified_base 21: mod_base = OTHER; note = 2'-O-methylcytidine
aatccacgtcagggcctcagc

SEQ ID NO: 1108 - RNA, 21 nt, synthetic construct
  source 1..21: mol_type = other RNA
  modified_base 1: mod_base = OTHER; note = 5'-phosphate-2'-O-methyluridine-3'-phosphorothioate
  modified_base 2: mod_base = OTHER; note = 2'-fluorouridine-3'-phosphorothioate
  modified_base 3: mod_base = OTHER; note = 2'-O-methylguanosine-3'-phosphate
  modified_base 4: mod_base = OTHER; note = 2'-fluorocytidine-3'-phosphate
  modified_base 5: mod_base = OTHER; note = 2'-O-methylcytidine-3'-phosphate
  modified_base 6: mod_base = OTHER; note = 2'-fluorocytidine-3'-phosphate
  modified_base 7: mod_base = OTHER; note = 2'-O-methyladenosine-3'-phosphate
  modified_base 8: mod_base = OTHER; note = 2'-fluorouridine-3'-phosphate
  modified_base 9: mod_base = OTHER; note = 2'-O-methylcytidine-3'-phosphate
  modified_base 10: mod_base = OTHER; note = 2'-fluorocytidine-3'-phosphate
  modified_base 11: mod_base = OTHER; note = 2'-O-methyladenosine-3'-phosphate
  modified_base 12: mod_base = OTHER; note = 2'-fluorocytidine-3'-phosphate
  modified_base 13: mod_base = OTHER; note = 2'-O-methylguanosine-3'-phosphate
  modified_base 14: mod_base = OTHER; note = 2'-fluorouridine-3'-phosphate
  modified_base 15: mod_base = OTHER; note = 2'-O-methylcytidine-3'-phosphate
  modified_base 16: mod_base = OTHER; note = 2'-fluoroadenosine-3'-phosphate
  modified_base 17: mod_base = OTHER; note = 2'-O-methylguanosine-3'-phosphate
  modified_base 18: mod_base = OTHER; note = 2'-fluoroguanosine-3'-phosphate
  modified_base 19: mod_base = OTHER; note = 2'-O-methylguanosine-3'-phosphorothioate
  modified_base 20: mod_base = OTHER; note = 2'-O-methylcytidine-3'-phosphorothioate
  modified_base 21: mod_base = OTHER; note = 2'-O-methylcytidine
ttgcccatccacgtcagggcc

SEQ ID NO: 1109 - RNA, 21 nt, synthetic construct
  source 1..21: mol_type = other RNA
  modified_base 1: mod_base = OTHER; note = 5'-phosphate-2'-O-methyluridine-3'-phosphorothioate
  modified_base 2: mod_base = OTHER; note = 2'-fluorouridine-3'-phosphorothioate
  modified_base 3: mod_base = OTHER; note = 2'-O-methyluridine-3'-phosphate
  modified_base 4: mod_base = OTHER; note = 2'-fluoroguanosine-3'-phosphate
  modified_base 5: mod_base = OTHER; note = 2'-O-methylcytidine-3'-phosphate
  modified_base 6: mod_base = OTHER; note = 2'-fluorocytidine-3'-phosphate
  modified_base 7: mod_base = OTHER; note = 2'-O-methylcytidine-3'-phosphate
  modified_base 8: mod_base = OTHER; note = 2'-fluoroadenosine-3'-phosphate
  modified_base 9: mod_base = OTHER; note = 2'-O-methyluridine-3'-phosphate
  modified_base 10: mod_base = OTHER; note = 2'-fluorocytidine-3'-phosphate
  modified_base 11: mod_base = OTHER; note = 2'-O-methylcytidine-3'-phosphate
  modified_base 12: mod_base = OTHER; note = 2'-fluoroadenosine-3'-phosphate
  modified_base 13: mod_base = OTHER; note = 2'-O-methylcytidine-3'-phosphate
  modified_base 14: mod_base = OTHER; note = 2'-fluoroguanosine-3'-phosphate
  modified_base 15: mod_base = OTHER; note = 2'-O-methyluridine-3'-phosphate
  modified_base 16: mod_base = OTHER; note = 2'-fluorocytidine-3'-phosphate
  modified_base 17: mod_base = OTHER; note = 2'-O-methyladenosine-3'-phosphate
  modified_base 18: mod_base = OTHER; note = 2'-fluoroguanosine-3'-phosphate
  modified_base 19: mod_base = OTHER; note = 2'-O-methylguanosine-3'-phosphorothioate
  modified_base 20: mod_base = OTHER; note = 2'-O-methylguanosine-3'-phosphorothioate
  modified_base 21: mod_base = OTHER; note = 2'-O-methylcytidine
tttgcccatccacgtcagggc

SEQ ID NO: 1110 - RNA, 21 nt, synthetic construct
  source 1..21: mol_type = other RNA
  modified_base 1: mod_base = OTHER; note = 5'-phosphate-2'-O-methyladenosine-3'-phosphorothioate
  modified_base 2: mod_base = OTHER; note = 2'-fluorouridine-3'-phosphorothioate
  modified_base 3: mod_base = OTHER; note = 2'-O-methyluridine-3'-phosphate
  modified_base 4: mod_base = OTHER; note = 2'-fluorouridine-3'-phosphate
  modified_base 5: mod_base = OTHER; note = 2'-O-methylguanosine-3'-phosphate
  modified_base 6: mod_base = OTHER; note = 2'-fluorocytidine-3'-phosphate
  modified_base 7: mod_base = OTHER; note = 2'-O-methylcytidine-3'-phosphate
  modified_base 8: mod_base = OTHER; note = 2'-fluorocytidine-3'-phosphate
  modified_base 9: mod_base = OTHER; note = 2'-O-methyladenosine-3'-phosphate
  modified_base 10: mod_base = OTHER; note = 2'-fluorouridine-3'-phosphate
  modified_base 11: mod_base = OTHER; note = 2'-O-methylcytidine-3'-phosphate
  modified_base 12: mod_base = OTHER; note = 2'-fluorocytidine-3'-phosphate
  modified_base 13: mod_base = OTHER; note = 2'-O-methyladenosine-3'-phosphate
  modified_base 14: mod_base = OTHER; note = 2'-fluorocytidine-3'-phosphate
  modified_base 15: mod_base = OTHER; note = 2'-O-methylguanosine-3'-phosphate
  modified_base 16: mod_base = OTHER; note = 2'-fluorouridine-3'-phosphate
  modified_base 17: mod_base = OTHER; note = 2'-O-methylcytidine-3'-phosphate
  modified_base 18: mod_base = OTHER; note = 2'-fluoroadenosine-3'-phosphate
  modified_base 19: mod_base = OTHER; note = 2'-O-methylguanosine-3'-phosphorothioate
  modified_base 20: mod_base = OTHER; note = 2'-O-methylguanosine-3'-phosphorothioate
  modified_base 21: mod_base = OTHER; note = 2'-O-methylguanosine
atttgcccatccacgtcaggg

SEQ ID NO: 1111 - RNA, 21 nt, synthetic construct
  source 1..21: mol_type = other RNA
  modified_base 1: mod_base = OTHER; note = 5'-phosphate-2'-O-methylguanosine-3'-phosphorothioate
  modified_base 2: mod_base = OTHER; note = 2'-fluoroadenosine-3'-phosphorothioate
  modified_base 3: mod_base = OTHER; note = 2'-O-methylguanosine-3'-phosphate
  modified_base 4: mod_base = OTHER; note = 2'-fluorocytidine-3'-phosphate
  modified_base 5: mod_base = OTHER; note = 2'-O-methyladenosine-3'-phosphate
  modified_base 6: mod_base = OTHER; note = 2'-fluoroguanosine-3'-phosphate
  modified_base 7: mod_base = OTHER; note = 2'-O-methylguanosine-3'-phosphate
  modified_base 8: mod_base = OTHER; note = 2'-fluoroguanosine-3'-phosphate
  modified_base 9: mod_base = OTHER; note = 2'-O-methylcytidine-3'-phosphate
  modified_base 10: mod_base = OTHER; note = 2'-fluoroguanosine-3'-phosphate
  modified_base 11: mod_base = OTHER; note = 2'-O-methyluridine-3'-phosphate
  modified_base 12: mod_base = OTHER; note = 2'-fluorocytidine-3'-phosphate
  modified_base 13: mod_base = OTHER; note = 2'-O-methyladenosine-3'-phosphate
  modified_base 14: mod_base = OTHER; note = 2'-fluorouridine-3'-phosphate
  modified_base 15: mod_base = OTHER; note = 2'-O-methylguanosine-3'-phosphate
  modified_base 16: mod_base = OTHER; note = 2'-fluorocytidine-3'-phosphate
  modified_base 17: mod_base = OTHER; note = 2'-O-methyladenosine-3'-phosphate
  modified_base 18: mod_base = OTHER; note = 2'-fluorocytidine-3'-phosphate
  modified_base 19: mod_base = OTHER; note = 2'-O-methyladenosine-3'-phosphorothioate
  modified_base 20: mod_base = OTHER; note = 2'-O-methyladenosine-3'-phosphorothioate
  modified_base 21: mod_base = OTHER; note = 2'-O-methylguanosine
gagcagggcgtcatgcacaag

SEQ ID NO: 1112 - RNA, 21 nt, synthetic construct
  source 1..21: mol_type = other RNA
  modified_base 1: mod_base = OTHER; note = 5'-phosphate-2'-O-methyladenosine-3'-phosphorothioate
  modified_base 2: mod_base = OTHER; note = 2'-fluoroguanosine-3'-phosphorothioate
  modified_base 3: mod_base = OTHER; note = 2'-O-methyladenosine-3'-phosphate
  modified_base 4: mod_base = OTHER; note = 2'-fluoroguanosine-3'-phosphate
  modified_base 5: mod_base = OTHER; note = 2'-O-methylcytidine-3'-phosphate
  modified_base 6: mod_base = OTHER; note = 2'-fluoroadenosine-3'-phosphate
  modified_base 7: mod_base = OTHER; note = 2'-O-methylguanosine-3'-phosphate
  modified_base 8: mod_base = OTHER; note = 2'-fluoroguanosine-3'-phosphate
  modified_base 9: mod_base = OTHER; note = 2'-O-methylguanosine-3'-phosphate
  modified_base 10: mod_base = OTHER; note = 2'-fluorocytidine-3'-phosphate
  modified_base 11: mod_base = OTHER; note = 2'-O-methylguanosine-3'-phosphate
  modified_base 12: mod_base = OTHER; note = 2'-fluorouridine-3'-phosphate
  modified_base 13: mod_base = OTHER; note = 2'-O-methylcytidine-3'-phosphate
  modified_base 14: mod_base = OTHER; note = 2'-fluoroadenosine-3'-phosphate
  modified_base 15: mod_base = OTHER; note = 2'-O-methyluridine-3'-phosphate
  modified_base 16: mod_base = OTHER; note = 2'-fluoroguanosine-3'-phosphate
  modified_base 17: mod_base = OTHER; note = 2'-O-methylcytidine-3'-phosphate
  modified_base 18: mod_base = OTHER; note = 2'-fluoroadenosine-3'-phosphate
  modified_base 19: mod_base = OTHER; note = 2'-O-methylcytidine-3'-phosphorothioate
  modified_base 20: mod_base = OTHER; note = 2'-O-methyladenosine-3'-phosphorothioate
  modified_base 21: mod_base = OTHER; note = 2'-O-methyladenosine
agagcagggcgtcatgcacaa

SEQ ID NO: 1113 - RNA, 21 nt, synthetic construct
  source 1..21: mol_type = other RNA
  modified_base 1: mod_base = OTHER; note = 5'-phosphate-2'-O-methyluridine-3'-phosphorothioate
  modified_base 2: mod_base = OTHER; note = 2'-fluorocytidine-3'-phosphorothioate
  modified_base 3: mod_base = OTHER; note = 2'-O-methyladenosine-3'-phosphate
  modified_base 4: mod_base = OTHER; note = 2'-fluoroadenosine-3'-phosphate
  modified_base 5: mod_base = OTHER; note = 2'-O-methyladenosine-3'-phosphate
  modified_base 6: mod_base = OTHER; note = 2'-fluorouridine-3'-phosphate
  modified_base 7: mod_base = OTHER; note = 2'-O-methyluridine-3'-phosphate
  modified_base 8: mod_base = OTHER; note = 2'-fluorouridine-3'-phosphate
  modified_base 9: mod_base = OTHER; note = 2'-O-methylcytidine-3'-phosphate
  modified_base 10: mod_base = OTHER; note = 2'-fluorocytidine-3'-phosphate
  modified_base 11: mod_base = OTHER; note = 2'-O-methylcytidine-3'-phosphate
  modified_base 12: mod_base = OTHER; note = 2'-fluoroguanosine-3'-phosphate
  modified_base 13: mod_base = OTHER; note = 2'-O-methyladenosine-3'-phosphate
  modified_base 14: mod_base = OTHER; note = 2'-fluoroguanosine-3'-phosphate
  modified_base 15: mod_base = OTHER; note = 2'-O-methyluridine-3'-phosphate
  modified_base 16: mod_base = OTHER; note = 2'-fluoroadenosine-3'-phosphate
  modified_base 17: mod_base = OTHER; note = 2'-O-methyladenosine-3'-phosphate
  modified_base 18: mod_base = OTHER; note = 2'-fluoroguanosine-3'-phosphate
  modified_base 19: mod_base = OTHER; note = 2'-O-methylcytidine-3'-phosphorothioate
  modified_base 20: mod_base = OTHER; note = 2'-O-methyladenosine-3'-phosphorothioate
  modified_base 21: mod_base = OTHER; note = 2'-O-methylguanosine
tcaaatttcccgagtaagcag

SEQ ID NO: 1114 - RNA, 21 nt, synthetic construct
  source 1..21: mol_type = other RNA
  modified_base 1: mod_base = OTHER; note = 5'-phosphate-2'-O-methyladenosine-3'-phosphorothioate
  modified_base 2: mod_base = OTHER; note = 2'-fluoroguanosine-3'-phosphorothioate
  modified_base 3: mod_base = OTHER; note = 2'-O-methylcytidine-3'-phosphate
  modified_base 4: mod_base = OTHER; note = 2'-fluoroadenosine-3'-phosphate
  modified_base 5: mod_base = OTHER; note = 2'-O-methyladenosine-3'-phosphate
  modified_base 6: mod_base = OTHER; note = 2'-fluoroadenosine-3'-phosphate
  modified_base 7: mod_base = OTHER; note = 2'-O-methyluridine-3'-phosphate
  modified_base 8: mod_base = OTHER; note = 2'-fluorouridine-3'-phosphate
  modified_base 9: mod_base = OTHER; note = 2'-O-methyluridine-3'-phosphate
  modified_base 10: mod_base = OTHER; note = 2'-fluorocytidine-3'-phosphate
  modified_base 11: mod_base = OTHER; note = 2'-O-methylcytidine-3'-phosphate
  modified_base 12: mod_base = OTHER; note = 2'-fluorocytidine-3'-phosphate
  modified_base 13: mod_base = OTHER; note = 2'-O-methylguanosine-3'-phosphate
  modified_base 14: mod_base = OTHER; note = 2'-fluoroadenosine-3'-phosphate
  modified_base 15: mod_base = OTHER; note = 2'-O-methylguanosine-3'-phosphate
  modified_base 16: mod_base = OTHER; note = 2'-fluorouridine-3'-phosphate
  modified_base 17: mod_base = OTHER; note = 2'-O-methyladenosine-3'-phosphate
  modified_base 18: mod_base = OTHER; note = 2'-fluoroadenosine-3'-phosphate
  modified_base 19: mod_base = OTHER; note = 2'-O-methylguanosine-3'-phosphorothioate
  modified_base 20: mod_base = OTHER; note = 2'-O-methylcytidine-3'-phosphorothioate
  modified_base 21: mod_base = OTHER; note = 2'-O-methyladenosine
agcaaatttcccgagtaagca

SEQ ID NO: 1115 - RNA, 21 nt, synthetic construct
  source 1..21: mol_type = other RNA
  modified_base 1: mod_base = OTHER; note = 5'-phosphate-2'-O-methyladenosine-3'-phosphorothioate
  modified_base 2: mod_base = OTHER; note = 2'-fluoroadenosine-3'-phosphorothioate
  modified_base 3: mod_base = OTHER; note = 2'-O-methylguanosine-3'-phosphate
  modified_base 4: mod_base = OTHER; note = 2'-fluorocytidine-3'-phosphate
  modified_base 5: mod_base = OTHER; note = 2'-O-methyladenosine-3'-phosphate
  modified_base 6: mod_base = OTHER; note = 2'-fluoroadenosine-3'-phosphate
  modified_base 7: mod_base = OTHER; note = 2'-O-methyladenosine-3'-phosphate
  modified_base 8: mod_base = OTHER; note = 2'-fluorouridine-3'-phosphate
  modified_base 9: mod_base = OTHER; note = 2'-O-methyluridine-3'-phosphate
  modified_base 10: mod_base = OTHER; note = 2'-fluorouridine-3'-phosphate
  modified_base 11: mod_base = OTHER; note = 2'-O-methylcytidine-3'-phosphate
  modified_base 12: mod_base = OTHER; note = 2'-fluorocytidine-3'-phosphate
  modified_base 13: mod_base = OTHER; note = 2'-O-methylcytidine-3'-phosphate
  modified_base 14: mod_base = OTHER; note = 2'-fluoroguanosine-3'-phosphate
  modified_base 15: mod_base = OTHER; note = 2'-O-methyladenosine-3'-phosphate
  modified_base 16: mod_base = OTHER; note = 2'-fluoroguanosine-3'-phosphate
  modified_base 17: mod_base = OTHER; note = 2'-O-methyluridine-3'-phosphate
  modified_base 18: mod_base = OTHER; note = 2'-fluoroadenosine-3'-phosphate
  modified_base 19: mod_base = OTHER; note = 2'-O-methyladenosine-3'-phosphorothioate
  modified_base 20: mod_base = OTHER; note = 2'-O-methylguanosine-3'-phosphorothioate
  modified_base 21: mod_base = OTHER; note = 2'-O-methylcytidine
aagcaaatttcccgagtaagc

SEQ ID NO: 1116 - RNA, 21 nt, synthetic construct
  source 1..21: mol_type = other RNA
  modified_base 1: mod_base = OTHER; note = 5'-phosphate-2'-O-methyladenosine-3'-phosphorothioate
  modified_base 2: mod_base = OTHER; note = 2'-fluoroadenosine-3'-phosphorothioate
  modified_base 3: mod_base = OTHER; note = 2'-O-methyladenosine-3'-phosphate
  modified_base 4: mod_base = OTHER; note = 2'-fluoroguanosine-3'-phosphate
  modified_base 5: mod_base = OTHER; note = 2'-O-methylcytidine-3'-phosphate
  modified_base 6: mod_base = OTHER; note = 2'-fluoroadenosine-3'-phosphate
  modified_base 7: mod_base = OTHER; note = 2'-O-methyladenosine-3'-phosphate
  modified_base 8: mod_base = OTHER; note = 2'-fluoroadenosine-3'-phosphate
  modified_base 9: mod_base = OTHER; note = 2'-O-methyluridine-3'-phosphate
  modified_base 10: mod_base = OTHER; note = 2'-fluorouridine-3'-phosphate
  modified_base 11: mod_base = OTHER; note = 2'-O-methyluridine-3'-phosphate
  modified_base 12: mod_base = OTHER; note = 2'-fluorocytidine-3'-phosphate
  modified_base 13: mod_base = OTHER; note = 2'-O-methylcytidine-3'-phosphate
  modified_base 14: mod_base = OTHER; note = 2'-fluorocytidine-3'-phosphate
  modified_base 15: mod_base = OTHER; note = 2'-O-methylguanosine-3'-phosphate
  modified_base 16: mod_base = OTHER; note = 2'-fluoroadenosine-3'-phosphate
  modified_base 17: mod_base = OTHER; note = 2'-O-methylguanosine-3'-phosphate
  modified_base 18: mod_base = OTHER; note = 2'-fluorouridine-3'-phosphate
  modified_base 19: mod_base = OTHER; note = 2'-O-methyladenosine-3'-phosphorothioate
  modified_base 20: mod_base = OTHER; note = 2'-O-methyladenosine-3'-phosphorothioate
  modified_base 21: mod_base = OTHER; note = 2'-O-methylguanosine
aaagcaaatttcccgagtaag

SEQ ID NO: 1117 - RNA, 21 nt, synthetic construct
  source 1..21: mol_type = other RNA
  modified_base 1: mod_base = OTHER; note = 5'-phosphate-2'-O-methyladenosine-3'-phosphorothioate
  modified_base 2: mod_base = OTHER; note = 2'-fluoroadenosine-3'-phosphorothioate
  modified_base 3: mod_base = OTHER; note = 2'-O-methyladenosine-3'-phosphate
  modified_base 4: mod_base = OTHER; note = 2'-fluoroadenosine-3'-phosphate
  modified_base 5: mod_base = OTHER; note = 2'-O-methylguanosine-3'-phosphate
  modified_base 6: mod_base = OTHER; note = 2'-fluorocytidine-3'-phosphate
  modified_base 7: mod_base = OTHER; note = 2'-O-methyladenosine-3'-phosphate
  modified_base 8: mod_base = OTHER; note = 2'-fluoroadenosine-3'-phosphate
  modified_base 9: mod_base = OTHER; note = 2'-O-methyladenosine-3'-phosphate
  modified_base 10: mod_base = OTHER; note = 2'-fluorouridine-3'-phosphate
  modified_base 11: mod_base = OTHER; note = 2'-O-methyluridine-3'-phosphate
  modified_base 12: mod_base = OTHER; note = 2'-fluorouridine-3'-phosphate
  modified_base 13: mod_base = OTHER; note = 2'-O-methylcytidine-3'-phosphate
  modified_base 14: mod_base = OTHER; note = 2'-fluorocytidine-3'-phosphate
  modified_base 15: mod_base = OTHER; note = 2'-O-methylcytidine-3'-phosphate
  modified_base 16: mod_base = OTHER; note = 2'-fluoroguanosine-3'-phosphate
  modified_base 17: mod_base = OTHER; note = 2'-O-methyladenosine-3'-phosphate
  modified_base 18: mod_base = OTHER; note = 2'-fluoroguanosine-3'-phosphate
  modified_base 19: mod_base = OTHER; note = 2'-O-methyluridine-3'-phosphorothioate
  modified_base 20: mod_base = OTHER; note = 2'-O-methyladenosine-3'-phosphorothioate
  modified_base 21: mod_base = OTHER; note = 2'-O-methyladenosine
aaaagcaaatttcccgagtaa

SEQ ID NO: 1118 - RNA, 21 nt, synthetic construct
  source 1..21: mol_type = other RNA
  modified_base 1: mod_base = OTHER; note = 5'-phosphate-2'-O-methyluridine-3'-phosphorothioate
  modified_base 2: mod_base = OTHER; note = 2'-fluoroadenosine-3'-phosphorothioate
  modified_base 3: mod_base = OTHER; note = 2'-O-methyladenosine-3'-phosphate
  modified_base 4: mod_base = OTHER; note = 2'-fluoroadenosine-3'-phosphate
  modified_base 5: mod_base = OTHER; note = 2'-O-methyladenosine-3'-phosphate
  modified_base 6: mod_base = OTHER; note = 2'-fluoroguanosine-3'-phosphate
  modified_base 7: mod_base = OTHER; note = 2'-O-methylcytidine-3'-phosphate
  modified_base 8: mod_base = OTHER; note = 2'-fluoroadenosine-3'-phosphate
  modified_base 9: mod_base = OTHER; note = 2'-O-methyladenosine-3'-phosphate
  modified_base 10: mod_base = OTHER; note = 2'-fluoroadenosine-3'-phosphate
  modified_base 11: mod_base = OTHER; note = 2'-O-methyluridine-3'-phosphate
  modified_base 12: mod_base = OTHER; note = 2'-fluorouridine-3'-phosphate
  modified_base 13: mod_base = OTHER; note = 2'-O-methyluridine-3'-phosphate
  modified_base 14: mod_base = OTHER; note = 2'-fluorocytidine-3'-phosphate
  modified_base 15: mod_base = OTHER; note = 2'-O-methylcytidine-3'-phosphate
  modified_base 16: mod_base = OTHER; note = 2'-fluorocytidine-3'-phosphate
  modified_base 17: mod_base = OTHER; note = 2'-O-methylguanosine-3'-phosphate
  modified_base 18: mod_base = OTHER; note = 2'-fluoroadenosine-3'-phosphate
  modified_base 19: mod_base = OTHER; note = 2'-O-methylguanosine-3'-phosphorothioate
  modified_base 20: mod_base = OTHER; note = 2'-O-methyluridine-3'-phosphorothioate
  modified_base 21: mod_base = OTHER; note = 2'-O-methyladenosine
taaaagcaaatttcccgagta

SEQ ID NO: 1119 - RNA, 21 nt, synthetic construct
  source 1..21: mol_type = other RNA
  modified_base 1: mod_base = OTHER; note = 5'-phosphate-2'-O-methyluridine-3'-phosphorothioate
  modified_base 2: mod_base = OTHER; note = 2'-fluorocytidine-3'-phosphorothioate
  modified_base 3: mod_base = OTHER; note = 2'-O-methyladenosine-3'-phosphate
  modified_base 4: mod_base = OTHER; note = 2'-fluoroadenosine-3'-phosphate
  modified_base 5: mod_base = OTHER; note = 2'-O-methyladenosine-3'-phosphate
  modified_base 6: mod_base = OTHER; note = 2'-fluoroadenosine-3'-phosphate
  modified_base 7: mod_base = OTHER; note = 2'-O-methylguanosine-3'-phosphate
  modified_base 8: mod_base = OTHER; note = 2'-fluorocytidine-3'-phosphate
  modified_base 9: mod_base = OTHER; note = 2'-O-methyladenosine-3'-phosphate
  modified_base 10: mod_base = OTHER; note = 2'-fluoroadenosine-3'-phosphate
  modified_base 11: mod_base = OTHER; note = 2'-O-methyladenosine-3'-phosphate
  modified_base 12: mod_base = OTHER; note = 2'-fluorouridine-3'-phosphate
  modified_base 13: mod_base = OTHER; note = 2'-O-methyluridine-3'-phosphate
  modified_base 14: mod_base = OTHER; note = 2'-fluorouridine-3'-phosphate
  modified_base 15: mod_base = OTHER; note = 2'-O-methylcytidine-3'-phosphate
  modified_base 16: mod_base = OTHER; note = 2'-fluorocytidine-3'-phosphate
  modified_base 17: mod_base = OTHER; note = 2'-O-methylcytidine-3'-phosphate
  modified_base 18: mod_base = OTHER; note = 2'-fluoroguanosine-3'-phosphate
  modified_base 19: mod_base = OTHER; note = 2'-O-methyladenosine-3'-phosphorothioate
  modified_base 20: mod_base = OTHER; note = 2'-O-methylguanosine-3'-phosphorothioate
  modified_base 21: mod_base = OTHER; note = 2'-O-methyluridine
tcaaaagcaaatttcccgagt

SEQ ID NO: 1120 - RNA, 21 nt, synthetic construct
  source 1..21: mol_type = other RNA
  modified_base 1: mod_base = OTHER; note = 5'-phosphate-2'-O-methyluridine-3'-phosphorothioate
  modified_base 2: mod_base = OTHER; note = 2'-fluorouridine-3'-phosphorothioate
  modified_base 3: mod_base = OTHER; note = 2'-O-methylguanosine-3'-phosphate
  modified_base 4: mod_base = OTHER; note = 2'-fluoroguanosine-3'-phosphate
  modified_base 5: mod_base = OTHER; note = 2'-O-methylcytidine-3'-phosphate
  modified_base 6: mod_base = OTHER; note = 2'-fluoroadenosine-3'-phosphate
  modified_base 7: mod_base = OTHER; note = 2'-O-methyladenosine-3'-phosphate
  modified_base 8: mod_base = OTHER; note = 2'-fluoroadenosine-3'-phosphate
  modified_base 9: mod_base = OTHER; note = 2'-O-methyladenosine-3'-phosphate
  modified_base 10: mod_base = OTHER; note = 2'-fluoroguanosine-3'-phosphate
  modified_base 11: mod_base = OTHER; note = 2'-O-methylcytidine-3'-phosphate
  modified_base 12: mod_base = OTHER; note = 2'-fluoroadenosine-3'-phosphate
  modified_base 13: mod_base = OTHER; note = 2'-O-methyladenosine-3'-phosphate
  modified_base 14: mod_base = OTHER; note = 2'-fluoroadenosine-3'-phosphate
  modified_base 15: mod_base = OTHER; note = 2'-O-methyluridine-3'-phosphate
  modified_base 16: mod_base = OTHER; note = 2'-fluorouridine-3'-phosphate
  modified_base 17: mod_base = OTHER; note = 2'-O-methyluridine-3'-phosphate
  modified_base 18: mod_base = OTHER; note = 2'-fluorocytidine-3'-phosphate
  modified_base 19: mod_base = OTHER; note = 2'-O-methylcytidine-3'-phosphorothioate
  modified_base 20: mod_base = OTHER; note = 2'-O-methylcytidine-3'-phosphorothioate
  modified_base 21: mod_base = OTHER; note = 2'-O-methylguanosine
ttggcaaaagcaaatttcccg

SEQ ID NO: 1121 - RNA, 21 nt, synthetic construct
  source 1..21: mol_type = other RNA
  modified_base 1: mod_base = OTHER; note = 5'-phosphate-2'-O-methyluridine-3'-phosphorothioate
  modified_base 2: mod_base = OTHER; note = 2'-fluorouridine-3'-phosphorothioate
  modified_base 3: mod_base = OTHER; note = 2'-O-methyluridine-3'-phosphate
  modified_base 4: mod_base = OTHER; note = 2'-fluoroguanosine-3'-phosphate
  modified_base 5: mod_base = OTHER; note = 2'-O-methylguanosine-3'-phosphate
  modified_base 6: mod_base = OTHER; note = 2'-fluorocytidine-3'-phosphate
  modified_base 7: mod_base = OTHER; note = 2'-O-methyladenosine-3'-phosphate
  modified_base 8: mod_base = OTHER; note = 2'-fluoroadenosine-3'-phosphate
  modified_base 9: mod_base = OTHER; note = 2'-O-methyladenosine-3'-phosphate
  modified_base 10: mod_base = OTHER; note = 2'-fluoroadenosine-3'-phosphate
  modified_base 11: mod_base = OTHER; note = 2'-O-methylguanosine-3'-phosphate
  modified_base 12: mod_base = OTHER; note = 2'-fluorocytidine-3'-phosphate
  modified_base 13: mod_base = OTHER; note = 2'-O-methyladenosine-3'-phosphate
  modified_base 14: mod_base = OTHER; note = 2'-fluoroadenosine-3'-phosphate
  modified_base 15: mod_base = OTHER; note = 2'-O-methyladenosine-3'-phosphate
  modified_base 16: mod_base = OTHER; note = 2'-fluorouridine-3'-phosphate
  modified_base 17: mod_base = OTHER; note = 2'-O-methyluridine-3'-phosphate
  modified_base 18: mod_base = OTHER; note = 2'-fluorouridine-3'-phosphate
  modified_base 19: mod_base = OTHER; note = 2'-O-methylcytidine-3'-phosphorothioate
  modified_base 20: mod_base = OTHER; note = 2'-O-methylcytidine-3'-phosphorothioate
  modified_base 21: mod_base = OTHER; note = 2'-O-methylcytidine
tttggcaaaagcaaatttccc

SEQ ID NO: 1122 - RNA, 21 nt, synthetic construct
  source 1..21: mol_type = other RNA
  modified_base 1: mod_base = OTHER; note = 5'-phosphate-2'-O-methyladenosine-3'-phosphorothioate
  modified_base 2: mod_base = OTHER; note = 2'-fluorouridine-3'-phosphorothioate
  modified_base 3: mod_base = OTHER; note = 2'-O-methyluridine-3'-phosphate
  modified_base 4: mod_base = OTHER; note = 2'-fluorouridine-3'-phosphate
  modified_base 5: mod_base = OTHER; note = 2'-O-methylguanosine-3'-phosphate
  modified_base 6: mod_base = OTHER; note = 2'-fluoroguanosine-3'-phosphate
  modified_base 7: mod_base = OTHER; note = 2'-O-methylcytidine-3'-phosphate
  modified_base 8: mod_base = OTHER; note = 2'-fluoroadenosine-3'-phosphate
  modified_base 9: mod_base = OTHER; note = 2'-O-methyladenosine-3'-phosphate
  modified_base 10: mod_base = OTHER; note = 2'-fluoroadenosine-3'-phosphate
  modified_base 11: mod_base = OTHER; note = 2'-O-methyladenosine-3'-phosphate
  modified_base 12: mod_base = OTHER; note = 2'-fluoroguanosine-3'-phosphate
  modified_base 13: mod_base = OTHER; note = 2'-O-methylcytidine-3'-phosphate
  modified_base 14: mod_base = OTHER; note = 2'-fluoroadenosine-3'-phosphate
  modified_base 15: mod_base = OTHER; note = 2'-O-methyladenosine-3'-phosphate
  modified_base 16: mod_base = OTHER; note = 2'-fluoroadenosine-3'-phosphate
  modified_base 17: mod_base = OTHER; note = 2'-O-methyluridine-3'-phosphate
  modified_base 18: mod_base = OTHER; note = 2'-fluorouridine-3'-phosphate
  modified_base 19: mod_base = OTHER; note = 2'-O-methyluridine-3'-phosphorothioate
  modified_base 20: mod_base = OTHER; note = 2'-O-methylcytidine-3'-phosphorothioate
  modified_base 21: mod_base = OTHER; note = 2'-O-methylcytidine
atttggcaaaagcaaatttcc

SEQ ID NO: 1123 - RNA, 21 nt, synthetic construct
  source 1..21: mol_type = other RNA
  modified_base 1: mod_base = OTHER; note = 5'-phosphate-2'-O-methyladenosine-3'-phosphorothioate
  modified_base 2: mod_base = OTHER; note = 2'-fluoroadenosine-3'-phosphorothioate
  modified_base 3: mod_base = OTHER; note = 2'-O-methylguanosine-3'-phosphate
  modified_base 4: mod_base = OTHER; note = 2'-fluorocytidine-3'-phosphate
  modified_base 5: mod_base = OTHER; note = 2'-O-methylguanosine-3'-phosphate
  modified_base 6: mod_base = OTHER; note = 2'-fluoroguanosine-3'-phosphate
  modified_base 7: mod_base = OTHER; note = 2'-O-methylguanosine-3'-phosphate
  modified_base 8: mod_base = OTHER; note = 2'-fluorouridine-3'-phosphate
  modified_base 9: mod_base = OTHER; note = 2'-O-methyluridine-3'-phosphate
  modified_base 10: mod_base = OTHER; note = 2'-fluorouridine-3'-phosphate
  modified_base 11: mod_base = OTHER; note = 2'-O-methylguanosine-3'-phosphate
  modified_base 12: mod_base = OTHER; note = 2'-fluoroguanosine-3'-phosphate
  modified_base 13: mod_base = OTHER; note = 2'-O-methylcytidine-3'-phosphate
  modified_base 14: mod_base = OTHER; note = 2'-fluoroadenosine-3'-phosphate
  modified_base 15: mod_base = OTHER; note = 2'-O-methyladenosine-3'-phosphate
  modified_base 16: mod_base = OTHER; note = 2'-fluoroadenosine-3'-phosphate
  modified_base 17: mod_base = OTHER; note = 2'-O-methyladenosine-3'-phosphate
  modified_base 18: mod_base = OTHER; note = 2'-fluoroguanosine-3'-phosphate
  modified_base 19: mod_base = OTHER; note = 2'-O-methylcytidine-3'-phosphorothioate
  modified_base 20: mod_base = OTHER; note = 2'-O-methyladenosine-3'-phosphorothioate
  modified_base 21: mod_base = OTHER; note = 2'-O-methyladenosine
aagcgggtttggcaaaagcaa

SEQ ID NO: 1124 - RNA, 21 nt, synthetic construct
  source 1..21: mol_type = other RNA
  modified_base 1: mod_base = OTHER; note = 5'-phosphate-2'-O-methyladenosine-3'-phosphorothioate
  modified_base 2: mod_base = OTHER; note = 2'-fluorouridine-3'-phosphorothioate
  modified_base 3: mod_base = OTHER; note = 2'-O-methyladenosine-3'-phosphate
  modified_base 4: mod_base = OTHER; note = 2'-fluorouridine-3'-phosphate
  modified_base 5: mod_base = OTHER; note = 2'-O-methylcytidine-3'-phosphate
  modified_base 6: mod_base = OTHER; note = 2'-fluorocytidine-3'-phosphate
  modified_base 7: mod_base = OTHER; note = 2'-O-methyladenosine-3'-phosphate
  modified_base 8: mod_base = OTHER; note = 2'-fluoroadenosine-3'-phosphate
  modified_base 9: mod_base = OTHER; note = 2'-O-methyladenosine-3'-phosphate
  modified_base 10: mod_base = OTHER; note = 2'-fluorocytidine-3'-phosphate
  modified_base 11: mod_base = OTHER; note = 2'-O-methylcytidine-3'-phosphate
  modified_base 12: mod_base = OTHER; note = 2'-fluoroguanosine-3'-phosphate
  modified_base 13: mod_base = OTHER; note = 2'-O-methylcytidine-3'-phosphate
  modified_base 14: mod_base = OTHER; note = 2'-fluorocytidine-3'-phosphate
  modified_base 15: mod_base = OTHER; note = 2'-O-methylguanosine-3'-phosphate
  modified_base 16: mod_base = OTHER; note = 2'-fluoroadenosine-3'-phosphate
  modified_base 17: mod_base = OTHER; note = 2'-O-methyladenosine-3'-phosphate
  modified_base 18: mod_base = OTHER; note = 2'-fluoroguanosine-3'-phosphate
  modified_base 19: mod_base = OTHER; note = 2'-O-methylcytidine-3'-phosphorothioate
  modified_base 20: mod_base = OTHER; note = 2'-O-methylguanosine-3'-phosphorothioate
  modified_base 21: mod_base = OTHER; note = 2'-O-methylguanosine
atatccaaaccgccgaagcgg

SEQ ID NO: 1125 - RNA, 21 nt, synthetic construct
  source 1..21: mol_type = other RNA
  modified_base 1: mod_base = OTHER; note = 5'-phosphate-2'-O-methyladenosine-3'-phosphorothioate
  modified_base 2: mod_base = OTHER; note = 2'-fluoroadenosine-3'-phosphorothioate
  modified_base 3: mod_base = OTHER; note = 2'-O-methyluridine-3'-phosphate
  modified_base 4: mod_base = OTHER; note = 2'-fluoroadenosine-3'-phosphate
  modified_base 5: mod_base = OTHER; note = 2'-O-methyluridine-3'-phosphate
  modified_base 6: mod_base = OTHER; note = 2'-fluorocytidine-3'-phosphate
  modified_base 7: mod_base = OTHER; note = 2'-O-methylcytidine-3'-phosphate
  modified_base 8: mod_base = OTHER; note = 2'-fluoroadenosine-3'-phosphate
  modified_base 9: mod_base = OTHER; note = 2'-O-methyladenosine-3'-phosphate
  modified_base 10: mod_base = OTHER; note = 2'-fluoroadenosine-3'-phosphate
  modified_base 11: mod_base = OTHER; note = 2'-O-methylcytidine-3'-phosphate
  modified_base 12: mod_base = OTHER; note = 2'-fluorocytidine-3'-phosphate
  modified_base 13: mod_base = OTHER; note = 2'-O-methylguanosine-3'-phosphate
  modified_base 14: mod_base = OTHER; note = 2'-fluorocytidine-3'-phosphate
  modified_base 15: mod_base = OTHER; note = 2'-O-methylcytidine-3'-phosphate
  modified_base 16: mod_base = OTHER; note = 2'-fluoroguanosine-3'-phosphate
  modified_base 17: mod_base = OTHER; note = 2'-O-methyladenosine-3'-phosphate
  modified_base 18: mod_base = OTHER; note = 2'-fluoroadenosine-3'-phosphate
  modified_base 19: mod_base = OTHER; note = 2'-O-methylguanosine-3'-phosphorothioate
  modified_base 20: mod_base = OTHER; note = 2'-O-methylcytidine-3'-phosphorothioate
  modified_base 21: mod_base = OTHER; note = 2'-O-methylguanosine
aatatccaaaccgccgaagcg

SEQ ID NO: 1126 - RNA, 21 nt, synthetic construct
  source 1..21: mol_type = other RNA
  modified_base 1: mod_base = OTHER; note = 5'-phosphate-2'-O-methyladenosine-3'-phosphorothioate
  modified_base 2: mod_base = OTHER; note = 2'-fluoroadenosine-3'-phosphorothioate
  modified_base 3: mod_base = OTHER; note = 2'-O-methyladenosine-3'-phosphate
  modified_base 4: mod_base = OTHER; note = 2'-fluorouridine-3'-phosphate
  modified_base 5: mod_base = OTHER; note = 2'-O-methyladenosine-3'-phosphate
  modified_base 6: mod_base = OTHER; note = 2'-fluorouridine-3'-phosphate
  modified_base 7: mod_base = OTHER; note = 2'-O-methylcytidine-3'-phosphate
  modified_base 8: mod_base = OTHER; note = 2'-fluorocytidine-3'-phosphate
  modified_base 9: mod_base = OTHER; note = 2'-O-methyladenosine-3'-phosphate
  modified_base 10: mod_base = OTHER; note = 2'-fluoroadenosine-3'-phosphate
  modified_base 11: mod_base = OTHER; note = 2'-O-methyladenosine-3'-phosphate
  modified_base 12: mod_base = OTHER; note = 2'-fluorocytidine-3'-phosphate
  modified_base 13: mod_base = OTHER; note = 2'-O-methylcytidine-3'-phosphate
  modified_base 14: mod_base = OTHER; note = 2'-fluoroguanosine-3'-phosphate
  modified_base 15: mod_base = OTHER; note = 2'-O-methylcytidine-3'-phosphate
  modified_base 16: mod_base = OTHER; note = 2'-fluorocytidine-3'-phosphate
  modified_base 17: mod_base = OTHER; note = 2'-O-methylguanosine-3'-phosphate
  modified_base 18: mod_base = OTHER; note = 2'-fluoroadenosine-3'-phosphate
  modified_base 19: mod_base = OTHER; note = 2'-O-methyladenosine-3'-phosphorothioate
  modified_base 20: mod_base = OTHER; note = 2'-O-methylguanosine-3'-phosphorothioate
  modified_base 21: mod_base = OTHER; note = 2'-O-methylcytidine
aaatatccaaaccgccgaagc

SEQ ID NO: 1127 - RNA, 21 nt, synthetic construct
  source 1..21: mol_type = other RNA
  modified_base 1: mod_base = OTHER; note = 5'-phosphate-2'-O-methyluridine-3'-phosphorothioate
  modified_base 2: mod_base = OTHER; note = 2'-fluoroadenosine-3'-phosphorothioate
  modified_base 3: mod_base = OTHER; note = 2'-O-methyladenosine-3'-phosphate
  modified_base 4: mod_base = OTHER; note = 2'-fluoroadenosine-3'-phosphate
  modified_base 5: mod_base = OTHER; note = 2'-O-methyluridine-3'-phosphate
  modified_base 6: mod_base = OTHER; note = 2'-fluoroadenosine-3'-phosphate
  modified_base 7: mod_base = OTHER; note = 2'-O-methyluridine-3'-phosphate
  modified_base 8: mod_base = OTHER; note = 2'-fluorocytidine-3'-phosphate
  modified_base 9: mod_base = OTHER; note = 2'-O-methylcytidine-3'-phosphate
  modified_base 10: mod_base = OTHER; note = 2'-fluoroadenosine-3'-phosphate
  modified_base 11: mod_base = OTHER; note = 2'-O-methyladenosine-3'-phosphate
  modified_base 12: mod_base = OTHER; note = 2'-fluoroadenosine-3'-phosphate
  modified_base 13: mod_base = OTHER; note = 2'-O-methylcytidine-3'-phosphate
  modified_base 14: mod_base = OTHER; note = 2'-fluorocytidine-3'-phosphate
  modified_base 15: mod_base = OTHER; note = 2'-O-methylguanosine-3'-phosphate
  modified_base 16: mod_base = OTHER; note = 2'-fluorocytidine-3'-phosphate
  modified_base 17: mod_base = OTHER; note = 2'-O-methylcytidine-3'-phosphate
  modified_base 18: mod_base = OTHER; note = 2'-fluoroguanosine-3'-phosphate
  modified_base 19: mod_base = OTHER; note = 2'-O-methyladenosine-3'-phosphorothioate
  modified_base 20: mod_base = OTHER; note = 2'-O-methyladenosine-3'-phosphorothioate
  modified_base 21: mod_base = OTHER; note = 2'-O-methylguanosine
taaatatccaaaccgccgaag

SEQ ID NO: 1128 - RNA, 21 nt, synthetic construct
  source 1..21: mol_type = other RNA
  modified_base 1: mod_base = OTHER; note = 5'-phosphate-2'-O-methyladenosine-3'-phosphorothioate
  modified_base 2: mod_base = OTHER; note = 2'-fluorouridine-3'-phosphorothioate
  modified_base 3: mod_base = OTHER; note = 2'-O-methyladenosine-3'-phosphate
  modified_base 4: mod_base = OTHER; note = 2'-fluoroadenosine-3'-phosphate
  modified_base 5: mod_base = OTHER; note = 2'-O-methyladenosine-3'-phosphate
  modified_base 6: mod_base = OTHER; note = 2'-fluorouridine-3'-phosphate
  modified_base 7: mod_base = OTHER; note = 2'-O-methyladenosine-3'-phosphate
  modified_base 8: mod_base = OTHER; note = 2'-fluorouridine-3'-phosphate
  modified_base 9: mod_base = OTHER; note = 2'-O-methylcytidine-3'-phosphate
  modified_base 10: mod_base = OTHER; note = 2'-fluorocytidine-3'-phosphate
  modified_base 11: mod_base = OTHER; note = 2'-O-methyladenosine-3'-phosphate
  modified_base 12: mod_base = OTHER; note = 2'-fluoroadenosine-3'-phosphate
  modified_base 13: mod_base = OTHER; note = 2'-O-methyladenosine-3'-phosphate
  modified_base 14: mod_base = OTHER; note = 2'-fluorocytidine-3'-phosphate
  modified_base 15: mod_base = OTHER; note = 2'-O-methylcytidine-3'-phosphate
  modified_base 16: mod_base = OTHER; note = 2'-fluoroguanosine-3'-phosphate
  modified_base 17: mod_base = OTHER; note = 2'-O-methylcytidine-3'-phosphate
  modified_base 18: mod_base = OTHER; note = 2'-fluorocytidine-3'-phosphate
  modified_base 19: mod_base = OTHER; note = 2'-O-methylguanosine-3'-phosphorothioate
  modified_base 20: mod_base = OTHER; note = 2'-O-methyladenosine-3'-phosphorothioate
  modified_base 21: mod_base = OTHER; note = 2'-O-methyladenosine
ataaatatccaaaccgccgaa

SEQ ID NO: 1129 - RNA, 21 nt, synthetic construct
  source 1..21: mol_type = other RNA
  modified_base 1: mod_base = OTHER; note = 5'-phosphate-2'-O-methyladenosine-3'-phosphorothioate
  modified_base 2: mod_base = OTHER; note = 2'-fluoroadenosine-3'-phosphorothioate
  modified_base 3: mod_base = OTHER; note = 2'-O-methyluridine-3'-phosphate
  modified_base 4: mod_base = OTHER; note = 2'-fluoroadenosine-3'-phosphate
  modified_base 5: mod_base = OTHER; note = 2'-O-methyladenosine-3'-phosphate
  modified_base 6: mod_base = OTHER; note = 2'-fluoroadenosine-3'-phosphate
  modified_base 7: mod_base = OTHER; note = 2'-O-methyluridine-3'-phosphate
  modified_base 8: mod_base = OTHER; note = 2'-fluoroadenosine-3'-phosphate
  modified_base 9: mod_base = OTHER; note = 2'-O-methyluridine-3'-phosphate
  modified_base 10: mod_base = OTHER; note = 2'-fluorocytidine-3'-phosphate
  modified_base 11: mod_base = OTHER; note = 2'-O-methylcytidine-3'-phosphate
  modified_base 12: mod_base = OTHER; note = 2'-fluoroadenosine-3'-phosphate
  modified_base 13: mod_base = OTHER; note = 2'-O-methyladenosine-3'-phosphate
  modified_base 14: mod_base = OTHER; note = 2'-fluoroadenosine-3'-phosphate
  modified_base 15: mod_base = OTHER; note = 2'-O-methylcytidine-3'-phosphate
  modified_base 16: mod_base = OTHER; note = 2'-fluorocytidine-3'-phosphate
  modified_base 17: mod_base = OTHER; note = 2'-O-methylguanosine-3'-phosphate
  modified_base 18: mod_base = OTHER; note = 2'-fluorocytidine-3'-phosphate
  modified_base 19: mod_base = OTHER; note = 2'-O-methylcytidine-3'-phosphorothioate
  modified_base 20: mod_base = OTHER; note = 2'-O-methylguanosine-3'-phosphorothioate
  modified_base 21: mod_base = OTHER; note = 2'-O-methyladenosine
aataaatatccaaaccgccga

SEQ ID NO: 1130 - RNA, 21 nt, synthetic construct
  source 1..21: mol_type = other RNA
  modified_base 1: mod_base = OTHER; note = 5'-phosphate-2'-O-methyladenosine-3'-phosphorothioate
  modified_base 2: mod_base = OTHER; note = 2'-fluoroadenosine-3'-phosphorothioate
  modified_base 3: mod_base = OTHER; note = 2'-O-methyladenosine-3'-phosphate
  modified_base 4: mod_base = OTHER; note = 2'-fluorouridine-3'-phosphate
  modified_base 5: mod_base = OTHER; note = 2'-O-methyladenosine-3'-phosphate
  modified_base 6: mod_base = OTHER; note = 2'-fluoroadenosine-3'-phosphate
  modified_base 7: mod_base = OTHER; note = 2'-O-methyladenosine-3'-phosphate
  modified_base 8: mod_base = OTHER; note = 2'-fluorouridine-3'-phosphate
  modified_base 9: mod_base = OTHER; note = 2'-O-methyladenosine-3'-phosphate
  modified_base 10: mod_base = OTHER; note = 2'-fluorouridine-3'-phosphate
  modified_base 11: mod_base = OTHER; note = 2'-O-methylcytidine-3'-phosphate
  modified_base 12: mod_base = OTHER; note = 2'-fluorocytidine-3'-phosphate
  modified_base 13: mod_base = OTHER; note = 2'-O-methyladenosine-3'-phosphate
  modified_base 14: mod_base = OTHER; note = 2'-fluoroadenosine-3'-phosphate
  modified_base 15: mod_base = OTHER; note = 2'-O-methyladenosine-3'-phosphate
  modified_base 16: mod_base = OTHER; note = 2'-fluorocytidine-3'-phosphate
  modified_base 17: mod_base = OTHER; note = 2'-O-methylcytidine-3'-phosphate
  modified_base 18: mod_base = OTHER; note = 2'-fluoroguanosine-3'-phosphate
  modified_base 19: mod_base = OTHER; note = 2'-O-methylcytidine-3'-phosphorothioate
  modified_base 20: mod_base = OTHER; note = 2'-O-methylcytidine-3'-phosphorothioate
  modified_base 21: mod_base = OTHER; note = 2'-O-methylguanosine
aaataaatatccaaaccgccg

SEQ ID NO: 1131 - RNA, 21 nt, synthetic construct
  source 1..21: mol_type = other RNA
  modified_base 1: mod_base = OTHER; note = 5'-phosphate-2'-O-methyluridine-3'-phosphorothioate
  modified_base 2: mod_base = OTHER; note = 2'-fluorocytidine-3'-phosphorothioate
  modified_base 3: mod_base = OTHER; note = 2'-O-methyladenosine-3'-phosphate
  modified_base 4: mod_base = OTHER; note = 2'-fluoroadenosine-3'-phosphate
  modified_base 5: mod_base = OTHER; note = 2'-O-methyluridine-3'-phosphate
  modified_base 6: mod_base = OTHER; note = 2'-fluoroadenosine-3'-phosphate
  modified_base 7: mod_base = OTHER; note = 2'-O-methyladenosine-3'-phosphate
  modified_base 8: mod_base = OTHER; note = 2'-fluoroadenosine-3'-phosphate
  modified_base 9: mod_base = OTHER; note = 2'-O-methyluridine-3'-phosphate
  modified_base 10: mod_base = OTHER; note = 2'-fluoroadenosine-3'-phosphate
  modified_base 11: mod_base = OTHER; note = 2'-O-methyluridine-3'-phosphate
  modified_base 12: mod_base = OTHER; note = 2'-fluorocytidine-3'-phosphate
  modified_base 13: mod_base = OTHER; note = 2'-O-methylcytidine-3'-phosphate
  modified_base 14: mod_base = OTHER; note = 2'-fluoroadenosine-3'-phosphate
  modified_base 15: mod_base = OTHER; note = 2'-O-methyladenosine-3'-phosphate
  modified_base 16: mod_base = OTHER; note = 2'-fluoroadenosine-3'-phosphate
  modified_base 17: mod_base = OTHER; note = 2'-O-methylcytidine-3'-phosphate
  modified_base 18: mod_base = OTHER; note = 2'-fluorocytidine-3'-phosphate
  modified_base 19: mod_base = OTHER; note = 2'-O-methylguanosine-3'-phosphorothioate
  modified_base 20: mod_base = OTHER; note = 2'-O-methylcytidine-3'-phosphorothioate
  modified_base 21: mod_base = OTHER; note = 2'-O-methylcytidine
tcaataaatatccaaaccgcc

SEQ ID NO: 1132 - RNA, 21 nt, synthetic construct
  source 1..21: mol_type = other RNA
  modified_base 1: mod_base = OTHER; note = 5'-phosphate-2'-O-methyladenosine-3'-phosphorothioate
  modified_base 2: mod_base = OTHER; note = 2'-fluorouridine-3'-phosphorothioate
  modified_base 3: mod_base = OTHER; note = 2'-O-methylcytidine-3'-phosphate
  modified_base 4: mod_base = OTHER; note = 2'-fluoroadenosine-3'-phosphate
  modified_base 5: mod_base = OTHER; note = 2'-O-methyladenosine-3'-phosphate
  modified_base 6: mod_base = OTHER; note = 2'-fluorouridine-3'-phosphate
  modified_base 7: mod_base = OTHER; note = 2'-O-methyladenosine-3'-phosphate
  modified_base 8: mod_base = OTHER; note = 2'-fluoroadenosine-3'-phosphate
  modified_base 9: mod_base = OTHER; note = 2'-O-methyladenosine-3'-phosphate
  modified_base 10: mod_base = OTHER; note = 2'-fluorouridine-3'-phosphate
  modified_base 11: mod_base = OTHER; note = 2'-O-methyladenosine-3'-phosphate
  modified_base 12: mod_base = OTHER; note = 2'-fluorouridine-3'-phosphate
  modified_base 13: mod_base = OTHER; note = 2'-O-methylcytidine-3'-phosphate
  modified_base 14: mod_base = OTHER; note = 2'-fluorocytidine-3'-phosphate
  modified_base 15: mod_base = OTHER; note = 2'-O-methyladenosine-3'-phosphate
  modified_base 16: mod_base = OTHER; note = 2'-fluoroadenosine-3'-phosphate
  modified_base 17: mod_base = OTHER; note = 2'-O-methyladenosine-3'-phosphate
  modified_base 18: mod_base = OTHER; note = 2'-fluorocytidine-3'-phosphate
  modified_base 19: mod_base = OTHER; note = 2'-O-methylcytidine-3'-phosphorothioate
  modified_base 20: mod_base = OTHER; note = 2'-O-methylguanosine-3'-phosphorothioate
  modified_base 21: mod_base = OTHER; note = 2'-O-methylcytidine
atcaataaatatccaaaccgc

SEQ ID NO: 1133 - RNA, 21 nt, synthetic construct
  source 1..21: mol_type = other RNA
  modified_base 1: mod_base = OTHER; note = 5'-phosphate-2'-O-methyladenosine-3'-phosphorothioate
  modified_base 2: mod_base = OTHER; note = 2'-fluoroguanosine-3'-phosphorothioate
  modified_base 3: mod_base = OTHER; note = 2'-O-methyluridine-3'-phosphate
  modified_base 4: mod_base = OTHER; note = 2'-fluorocytidine-3'-phosphate
  modified_base 5: mod_base = OTHER; note = 2'-O-methyladenosine-3'-phosphate
  modified_base 6: mod_base = OTHER; note = 2'-fluoroadenosine-3'-phosphate
  modified_base 7: mod_base = OTHER; note = 2'-O-methyluridine-3'-phosphate
  modified_base 8: mod_base = OTHER; note = 2'-fluoroadenosine-3'-phosphate
  modified_base 9: mod_base = OTHER; note = 2'-O-methyladenosine-3'-phosphate
  modified_base 10: mod_base = OTHER; note = 2'-fluoroadenosine-3'-phosphate
  modified_base 11: mod_base = OTHER; note = 2'-O-methyluridine-3'-phosphate
  modified_base 12: mod_base = OTHER; note = 2'-fluoroadenosine-3'-phosphate
  modified_base 13: mod_base = OTHER; note = 2'-O-methyluridine-3'-phosphate
  modified_base 14: mod_base = OTHER; note = 2'-fluorocytidine-3'-phosphate
  modified_base 15: mod_base = OTHER; note = 2'-O-methylcytidine-3'-phosphate
  modified_base 16: mod_base = OTHER; note = 2'-fluoroadenosine-3'-phosphate
  modified_base 17: mod_base = OTHER; note = 2'-O-methyladenosine-3'-phosphate
  modified_base 18: mod_base = OTHER; note = 2'-fluoroadenosine-3'-phosphate
  modified_base 19: mod_base = OTHER; note = 2'-O-methylcytidine-3'-phosphorothioate
  modified_base 20: mod_base = OTHER; note = 2'-O-methylcytidine-3'-phosphorothioate
  modified_base 21: mod_base = OTHER; note = 2'-O-methylguanosine
agtcaataaatatccaaaccg

SEQ ID NO: 1134 - RNA, 21 nt, synthetic construct
  source 1..21: mol_type = other RNA
  modified_base 1: mod_base = OTHER; note = 5'-phosphate-2'-O-methyladenosine-3'-phosphorothioate
  modified_base 2: mod_base = OTHER; note = 2'-fluoroguanosine-3'-phosphorothioate
  modified_base 3: mod_base = OTHER; note = 2'-O-methylguanosine-3'-phosphate
  modified_base 4: mod_base = OTHER; note = 2'-fluorouridine-3'-phosphate
  modified_base 5: mod_base = OTHER; note = 2'-O-methylcytidine-3'-phosphate
  modified_base 6: mod_base = OTHER; note = 2'-fluoroadenosine-3'-phosphate
  modified_base 7: mod_base = OTHER; note = 2'-O-methyladenosine-3'-phosphate
  modified_base 8: mod_base = OTHER; note = 2'-fluorouridine-3'-phosphate
  modified_base 9: mod_base = OTHER; note = 2'-O-methyladenosine-3'-phosphate
  modified_base 10: mod_base = OTHER; note = 2'-fluoroadenosine-3'-phosphate
  modified_base 11: mod_base = OTHER; note = 2'-O-methyladenosine-3'-phosphate
  modified_base 12: mod_base = OTHER; note = 2'-fluorouridine-3'-phosphate
  modified_base 13: mod_base = OTHER; note = 2'-O-methyladenosine-3'-phosphate
  modified_base 14: mod_base = OTHER; note = 2'-fluorouridine-3'-phosphate
  modified_base 15: mod_base = OTHER; note = 2'-O-methylcytidine-3'-phosphate
  modified_base 16: mod_base = OTHER; note = 2'-fluorocytidine-3'-phosphate
  modified_base 17: mod_base = OTHER; note = 2'-O-methyladenosine-3'-phosphate
  modified_base 18: mod_base = OTHER; note = 2'-fluoroadenosine-3'-phosphate
  modified_base 19: mod_base = OTHER; note = 2'-O-methyladenosine-3'-phosphorothioate
  modified_base 20: mod_base = OTHER; note = 2'-O-methylcytidine-3'-phosphorothioate
  modified_base 21: mod_base = OTHER; note = 2'-O-methylcytidine
aggtcaataaatatccaaacc

SEQ ID NO: 1135 - RNA, 21 nt, synthetic construct
  source 1..21: mol_type = other RNA
  modified_base 1: mod_base = OTHER; note = 5'-phosphate-2'-O-methyladenosine-3'-phosphorothioate
  modified_base 2: mod_base = OTHER; note = 2'-fluoroadenosine-3'-phosphorothioate
  modified_base 3: mod_base = OTHER; note = 2'-O-methylguanosine-3'-phosphate
  modified_base 4: mod_base = OTHER; note = 2'-fluoroguanosine-3'-phosphate
  modified_base 5: mod_base = OTHER; note = 2'-O-methyluridine-3'-phosphate
  modified_base 6: mod_base = OTHER; note = 2'-fluorocytidine-3'-phosphate
  modified_base 7: mod_base = OTHER; note = 2'-O-methyladenosine-3'-phosphate
  modified_base 8: mod_base = OTHER; note = 2'-fluoroadenosine-3'-phosphate
  modified_base 9: mod_base = OTHER; note = 2'-O-methyluridine-3'-phosphate
  modified_base 10: mod_base = OTHER; note = 2'-fluoroadenosine-3'-phosphate
  modified_base 11: mod_base = OTHER; note = 2'-O-methyladenosine-3'-phosphate
  modified_base 12: mod_base = OTHER; note = 2'-fluoroadenosine-3'-phosphate
  modified_base 13: mod_base = OTHER; note = 2'-O-methyluridine-3'-phosphate
  modified_base 14: mod_base = OTHER; note = 2'-fluoroadenosine-3'-phosphate
  modified_base 15: mod_base = OTHER; note = 2'-O-methyluridine-3'-phosphate
  modified_base 16: mod_base = OTHER; note = 2'-fluorocytidine-3'-phosphate
  modified_base 17: mod_base = OTHER; note = 2'-O-methylcytidine-3'-phosphate
  modified_base 18: mod_base = OTHER; note = 2'-fluoroadenosine-3'-phosphate
  modified_base 19: mod_base = OTHER; note = 2'-O-methyladenosine-3'-phosphorothioate
  modified_base 20: mod_base = OTHER; note = 2'-O-methyladenosine-3'-phosphorothioate
  modified_base 21: mod_base = OTHER; note = 2'-O-methylcytidine
aaggtcaataaatatccaaac

SEQ ID NO: 1136 - RNA, 21 nt, synthetic construct
  source 1..21: mol_type = other RNA
  modified_base 1: mod_base = OTHER; note = 5'-phosphate-2'-O-methyladenosine-3'-phosphorothioate
  modified_base 2: mod_base = OTHER; note = 2'-fluoroguanosine-3'-phosphorothioate
  modified_base 3: mod_base = OTHER; note = 2'-O-methyladenosine-3'-phosphate
  modified_base 4: mod_base = OTHER; note = 2'-fluoroguanosine-3'-phosphate
  modified_base 5: mod_base = OTHER; note = 2'-O-methylguanosine-3'-phosphate
  modified_base 6: mod_base = OTHER; note = 2'-fluorouridine-3'-phosphate
  modified_base 7: mod_base = OTHER; note = 2'-O-methylcytidine-3'-phosphate
  modified_base 8: mod_base = OTHER; note = 2'-fluoroadenosine-3'-phosphate
  modified_base 9: mod_base = OTHER; note = 2'-O-methyladenosine-3'-phosphate
  modified_base 10: mod_base = OTHER; note = 2'-fluorouridine-3'-phosphate
  modified_base 11: mod_base = OTHER; note = 2'-O-methyladenosine-3'-phosphate
  modified_base 12: mod_base = OTHER; note = 2'-fluoroadenosine-3'-phosphate
  modified_base 13: mod_base = OTHER; note = 2'-O-methyladenosine-3'-phosphate
  modified_base 14: mod_base = OTHER; note = 2'-fluorouridine-3'-phosphate
  modified_base 15: mod_base = OTHER; note = 2'-O-methyladenosine-3'-phosphate
  modified_base 16: mod_base = OTHER; note = 2'-fluorouridine-3'-phosphate
  modified_base 17: mod_base = OTHER; note = 2'-O-methylcytidine-3'-phosphate
  modified_base 18: mod_base = OTHER; note = 2'-fluorocytidine-3'-phosphate
  modified_base 19: mod_base = OTHER; note = 2'-O-methyladenosine-3'-phosphorothioate
  modified_base 20: mod_base = OTHER; note = 2'-O-methyladenosine-3'-phosphorothioate
  modified_base 21: mod_base = OTHER; note = 2'-O-methyladenosine
agaggtcaataaatatccaaa

SEQ ID NO: 1137 - RNA, 21 nt, synthetic construct
  source 1..21: mol_type = other RNA
  modified_base 1: mod_base = OTHER; note = 5'-phosphate-2'-O-methyladenosine-3'-phosphorothioate
  modified_base 2: mod_base = OTHER; note = 2'-fluorocytidine-3'-phosphorothioate
  modified_base 3: mod_base = OTHER; note = 2'-O-methylguanosine-3'-phosphate
  modified_base 4: mod_base = OTHER; note = 2'-fluoroadenosine-3'-phosphate
  modified_base 5: mod_base = OTHER; note = 2'-O-methylguanosine-3'-phosphate
  modified_base 6: mod_base = OTHER; note = 2'-fluoroguanosine-3'-phosphate
  modified_base 7: mod_base = OTHER; note = 2'-O-methyluridine-3'-phosphate
  modified_base 8: mod_base = OTHER; note = 2'-fluorocytidine-3'-phosphate
  modified_base 9: mod_base = OTHER; note = 2'-O-methyladenosine-3'-phosphate
  modified_base 10: mod_base = OTHER; note = 2'-fluoroadenosine-3'-phosphate
  modified_base 11: mod_base = OTHER; note = 2'-O-methyluridine-3'-phosphate
  modified_base 12: mod_base = OTHER; note = 2'-fluoroadenosine-3'-phosphate
  modified_base 13: mod_base = OTHER; note = 2'-O-methyladenosine-3'-phosphate
  modified_base 14: mod_base = OTHER; note = 2'-fluoroadenosine-3'-phosphate
  modified_base 15: mod_base = OTHER; note = 2'-O-methyluridine-3'-phosphate
  modified_base 16: mod_base = OTHER; note = 2'-fluoroadenosine-3'-phosphate
  modified_base 17: mod_base = OTHER; note = 2'-O-methyluridine-3'-phosphate
  modified_base 18: mod_base = OTHER; note = 2'-fluorocytidine-3'-phosphate
  modified_base 19: mod_base = OTHER; note = 2'-O-methylcytidine-3'-phosphorothioate
  modified_base 20: mod_base = OTHER; note = 2'-O-methyladenosine-3'-phosphorothioate
  modified_base 21: mod_base = OTHER; note = 2'-O-methyladenosine
acgaggtcaataaatatccaa

SEQ ID NO: 1138 - RNA, 21 nt, synthetic construct
  source 1..21: mol_type = other RNA
  modified_base 1: mod_base = OTHER; note = 5'-phosphate-2'-O-methyluridine-3'-phosphorothioate
  modified_base 2: mod_base = OTHER; note = 2'-fluoroadenosine-3'-phosphorothioate
  modified_base 3: mod_base = OTHER; note = 2'-O-methylcytidine-3'-phosphate
  modified_base 4: mod_base = OTHER; note = 2'-fluoroguanosine-3'-phosphate
  modified_base 5: mod_base = OTHER; note = 2'-O-methyladenosine-3'-phosphate
  modified_base 6: mod_base = OTHER; note = 2'-fluoroguanosine-3'-phosphate
  modified_base 7: mod_base = OTHER; note = 2'-O-methylguanosine-3'-phosphate
  modified_base 8: mod_base = OTHER; note = 2'-fluorouridine-3'-phosphate
  modified_base 9: mod_base = OTHER; note = 2'-O-methylcytidine-3'-phosphate
  modified_base 10: mod_base = OTHER; note = 2'-fluoroadenosine-3'-phosphate
  modified_base 11: mod_base = OTHER; note = 2'-O-methyladenosine-3'-phosphate
  modified_base 12: mod_base = OTHER; note = 2'-fluorouridine-3'-phosphate
  modified_base 13: mod_base = OTHER; note = 2'-O-methyladenosine-3'-phosphate
  modified_base 14: mod_base = OTHER; note = 2'-fluoroadenosine-3'-phosphate
  modified_base 15: mod_base = OTHER; note = 2'-O-methyladenosine-3'-phosphate
  modified_base 16: mod_base = OTHER; note = 2'-fluorouridine-3'-phosphate
  modified_base 17: mod_base = OTHER; note = 2'-O-methyladenosine-3'-phosphate
  modified_base 18: mod_base = OTHER; note = 2'-fluorouridine-3'-phosphate
  modified_base 19: mod_base = OTHER; note = 2'-O-methylcytidine-3'-phosphorothioate
  modified_base 20: mod_base = OTHER; note = 2'-O-methylcytidine-3'-phosphorothioate
  modified_base 21: mod_base = OTHER; note = 2'-O-methyladenosine
tacgaggtcaataaatatcca

SEQ ID NO: 1139 - RNA, 21 nt, synthetic construct
  source 1..21: mol_type = other RNA
  modified_base 1: mod_base = OTHER; note = 5'-phosphate-2'-O-methyladenosine-3'-phosphorothioate
  modified_base 2: mod_base = OTHER; note = 2'-fluoroguanosine-3'-phosphorothioate
  modified_base 3: mod_base = OTHER; note = 2'-O-methyladenosine-3'-phosphate
  modified_base 4: mod_base = OTHER; note = 2'-fluorocytidine-3'-phosphate
  modified_base 5: mod_base = OTHER; note = 2'-O-methylguanosine-3'-phosphate
  modified_base 6: mod_base = OTHER; note = 2'-fluoroadenosine-3'-phosphate
  modified_base 7: mod_base = OTHER; note = 2'-O-methylguanosine-3'-phosphate
  modified_base 8: mod_base = OTHER; note = 2'-fluoroguanosine-3'-phosphate
  modified_base 9: mod_base = OTHER; note = 2'-O-methyluridine-3'-phosphate
  modified_base 10: mod_base = OTHER; note = 2'-fluorocytidine-3'-phosphate
  modified_base 11: mod_base = OTHER; note = 2'-O-methyladenosine-3'-phosphate
  modified_base 12: mod_base = OTHER; note = 2'-fluoroadenosine-3'-phosphate
  modified_base 13: mod_base = OTHER; note = 2'-O-methyluridine-3'-phosphate
  modified_base 14: mod_base = OTHER; note = 2'-fluoroadenosine-3'-phosphate
  modified_base 15: mod_base = OTHER; note = 2'-O-methyladenosine-3'-phosphate
  modified_base 16: mod_base = OTHER; note = 2'-fluoroadenosine-3'-phosphate
  modified_base 17: mod_base = OTHER; note = 2'-O-methyluridine-3'-phosphate
  modified_base 18: mod_base = OTHER; note = 2'-fluoroadenosine-3'-phosphate
  modified_base 19: mod_base = OTHER; note = 2'-O-methyluridine-3'-phosphorothioate
  modified_base 20: mod_base = OTHER; note = 2'-O-methylcytidine-3'-phosphorothioate
  modified_base 21: mod_base = OTHER; note = 2'-O-methylcytidine
agacgaggtcaataaatatcc

SEQ ID NO: 1140 - RNA, 21 nt, synthetic construct
  source 1..21: mol_type = other RNA
  modified_base 1: mod_base = OTHER; note = 5'-phosphate-2'-O-methyluridine-3'-phosphorothioate
  modified_base 2: mod_base = OTHER; note = 2'-fluoroguanosine-3'-phosphorothioate
  modified_base 3: mod_base = OTHER; note = 2'-O-methyladenosine-3'-phosphate
  modified_base 4: mod_base = OTHER; note = 2'-fluoroguanosine-3'-phosphate
  modified_base 5: mod_base = OTHER; note = 2'-O-methylguanosine-3'-phosphate
  modified_base 6: mod_base = OTHER; note = 2'-fluoroadenosine-3'-phosphate
  modified_base 7: mod_base = OTHER; note = 2'-O-methylcytidine-3'-phosphate
  modified_base 8: mod_base = OTHER; note = 2'-fluoroguanosine-3'-phosphate
  modified_base 9: mod_base = OTHER; note = 2'-O-methyladenosine-3'-phosphate
  modified_base 10: mod_base = OTHER; note = 2'-fluoroguanosine-3'-phosphate
  modified_base 11: mod_base = OTHER; note = 2'-O-methylguanosine-3'-phosphate
  modified_base 12: mod_base = OTHER; note = 2'-fluorouridine-3'-phosphate
  modified_base 13: mod_base = OTHER; note = 2'-O-methylcytidine-3'-phosphate
  modified_base 14: mod_base = OTHER; note = 2'-fluoroadenosine-3'-phosphate
  modified_base 15: mod_base = OTHER; note = 2'-O-methyladenosine-3'-phosphate
  modified_base 16: mod_base = OTHER; note = 2'-fluorouridine-3'-phosphate
  modified_base 17: mod_base = OTHER; note = 2'-O-methyladenosine-3'-phosphate
  modified_base 18: mod_base = OTHER; note = 2'-fluoroadenosine-3'-phosphate
  modified_base 19: mod_base = OTHER; note = 2'-O-methyladenosine-3'-phosphorothioate
  modified_base 20: mod_base = OTHER; note = 2'-O-methyluridine-3'-phosphorothioate
  modified_base 21: mod_base = OTHER; note = 2'-O-methyladenosine
tgaggacgaggtcaataaata

SEQ ID NO: 1141 - RNA, 21 nt, synthetic construct
  source 1..21: mol_type = other RNA
  modified_base 1: mod_base = OTHER; note = 5'-phosphate-2'-O-methyladenosine-3'-phosphorothioate
  modified_base 2: mod_base = OTHER; note = 2'-fluorouridine-3'-phosphorothioate
  modified_base 3: mod_base = OTHER; note = 2'-O-methylcytidine-3'-phosphate
  modified_base 4: mod_base = OTHER; note = 2'-fluoroguanosine-3'-phosphate
  modified_base 5: mod_base = OTHER; note = 2'-O-methylguanosine-3'-phosphate
  modified_base 6: mod_base = OTHER; note = 2'-fluoroadenosine-3'-phosphate
  modified_base 7: mod_base = OTHER; note = 2'-O-methylguanosine-3'-phosphate
  modified_base 8: mod_base = OTHER; note = 2'-fluoroguanosine-3'-phosphate
  modified_base 9: mod_base = OTHER; note = 2'-O-methyladenosine-3'-phosphate
  modified_base 10: mod_base = OTHER; note = 2'-fluorocytidine-3'-phosphate
  modified_base 11: mod_base = OTHER; note = 2'-O-methylguanosine-3'-phosphate
  modified_base 12: mod_base = OTHER; note = 2'-fluoroadenosine-3'-phosphate
  modified_base 13: mod_base = OTHER; note = 2'-O-methylguanosine-3'-phosphate
  modified_base 14: mod_base = OTHER; note = 2'-fluoroguanosine-3'-phosphate
  modified_base 15: mod_base = OTHER; note = 2'-O-methyluridine-3'-phosphate
  modified_base 16: mod_base = OTHER; note = 2'-fluorocytidine-3'-phosphate
  modified_base 17: mod_base = OTHER; note = 2'-O-methyladenosine-3'-phosphate
  modified_base 18: mod_base = OTHER; note = 2'-fluoroadenosine-3'-phosphate
  modified_base 19: mod_base = OTHER; note = 2'-O-methyluridine-3'-phosphorothioate
  modified_base 20: mod_base = OTHER; note = 2'-O-methyladenosine-3'-phosphorothioate
  modified_base 21: mod_base = OTHER; note = 2'-O-methyladenosine
atcggaggacgaggtcaataa

SEQ ID NO: 1142 - RNA, 21 nt, synthetic construct
  source 1..21: mol_type = other RNA
  modified_base 1: mod_base = OTHER; note = 5'-phosphate-2'-O-methyluridine-3'-phosphorothioate
  modified_base 2: mod_base = OTHER; note = 2'-fluorocytidine-3'-phosphorothioate
  modified_base 3: mod_base = OTHER; note = 2'-O-methyladenosine-3'-phosphate
  modified_base 4: mod_base = OTHER; note = 2'-fluoroguanosine-3'-phosphate
  modified_base 5: mod_base = OTHER; note = 2'-O-methylcytidine-3'-phosphate
  modified_base 6: mod_base = OTHER; note = 2'-fluoroguanosine-3'-phosphate
  modified_base 7: mod_base = OTHER; note = 2'-O-methyladenosine-3'-phosphate
  modified_base 8: mod_base = OTHER; note = 2'-fluoroguanosine-3'-phosphate
  modified_base 9: mod_base = OTHER; note = 2'-O-methyluridine-3'-phosphate
  modified_base 10: mod_base = OTHER; note = 2'-fluorocytidine-3'-phosphate
  modified_base 11: mod_base = OTHER; note = 2'-O-methylguanosine-3'-phosphate
  modified_base 12: mod_base = OTHER; note = 2'-fluoroguanosine-3'-phosphate
  modified_base 13: mod_base = OTHER; note = 2'-O-methyladenosine-3'-phosphate
  modified_base 14: mod_base = OTHER; note = 2'-fluoroguanosine-3'-phosphate
  modified_base 15: mod_base = OTHER; note = 2'-O-methylguanosine-3'-phosphate
  modified_base 16: mod_base = OTHER; note = 2'-fluoroadenosine-3'-phosphate
  modified_base 17: mod_base = OTHER; note = 2'-O-methylcytidine-3'-phosphate
  modified_base 18: mod_base = OTHER; note = 2'-fluoroguanosine-3'-phosphate
  modified_base 19: mod_base = OTHER; note = 2'-O-methyladenosine-3'-phosphorothioate
  modified_base 20: mod_base = OTHER; note = 2'-O-methylguanosine-3'-phosphorothioate
  modified_base 21: mod_base = OTHER; note = 2'-O-methylguanosine
tcagcgagtcggaggacgagg

SEQ ID NO: 1143 - RNA, 21 nt, synthetic construct
  source 1..21: mol_type = other RNA
  modified_base 1: mod_base = OTHER; note = 5'-phosphate-2'-O-methyladenosine-3'-phosphorothioate
  modified_base 2: mod_base = OTHER; note = 2'-fluorouridine-3'-phosphorothioate
  modified_base 3: mod_base = OTHER; note = 2'-O-methylguanosine-3'-phosphate
  modified_base 4: mod_base = OTHER; note = 2'-fluorouridine-3'-phosphate
  modified_base 5: mod_base = OTHER; note = 2'-O-methylcytidine-3'-phosphate
  modified_base 6: mod_base = OTHER; note = 2'-fluoroadenosine-3'-phosphate
  modified_base 7: mod_base = OTHER; note = 2'-O-methylguanosine-3'-phosphate
  modified_base 8: mod_base = OTHER; note = 2'-fluorocytidine-3'-phosphate
  modified_base 9: mod_base = OTHER; note = 2'-O-methylguanosine-3'-phosphate
  modified_base 10: mod_base = OTHER; note = 2'-fluoroadenosine-3'-phosphate
  modified_base 11: mod_base = OTHER; note = 2'-O-methylguanosine-3'-phosphate
  modified_base 12: mod_base = OTHER; note = 2'-fluorouridine-3'-phosphate
  modified_base 13: mod_base = OTHER; note = 2'-O-methylcytidine-3'-phosphate
  modified_base 14: mod_base = OTHER; note = 2'-fluoroguanosine-3'-phosphate
  modified_base 15: mod_base = OTHER; note = 2'-O-methylguanosine-3'-phosphate
  modified_base 16: mod_base = OTHER; note = 2'-fluoroadenosine-3'-phosphate
  modified_base 17: mod_base = OTHER; note = 2'-O-methylguanosine-3'-phosphate
  modified_base 18: mod_base = OTHER; note = 2'-fluoroguanosine-3'-phosphate
  modified_base 19: mod_base = OTHER; note = 2'-O-methyladenosine-3'-phosphorothioate
  modified_base 20: mod_base = OTHER; note = 2'-O-methylcytidine-3'-phosphorothioate
  modified_base 21: mod_base = OTHER; note = 2'-O-methylguanosine
atgtcagcgagtcggaggacg

SEQ ID NO: 1144 - RNA, 21 nt, synthetic construct
  source 1..21: mol_type = other RNA
  modified_base 1: mod_base = OTHER; note = 5'-phosphate-2'-O-methyladenosine-3'-phosphorothioate
  modified_base 2: mod_base = OTHER; note = 2'-fluorouridine-3'-phosphorothioate
  modified_base 3: mod_base = OTHER; note = 2'-O-methylcytidine-3'-phosphate
  modified_base 4: mod_base = OTHER; note = 2'-fluorocytidine-3'-phosphate
  modified_base 5: mod_base = OTHER; note = 2'-O-methyladenosine-3'-phosphate
  modified_base 6: mod_base = OTHER; note = 2'-fluoroadenosine-3'-phosphate
  modified_base 7: mod_base = OTHER; note = 2'-O-methyladenosine-3'-phosphate
  modified_base 8: mod_base = OTHER; note = 2'-fluoroadenosine-3'-phosphate
  modified_base 9: mod_base = OTHER; note = 2'-O-methylcytidine-3'-phosphate
  modified_base 10: mod_base = OTHER; note = 2'-fluoroguanosine-3'-phosphate
  modified_base 11: mod_base = OTHER; note = 2'-O-methyluridine-3'-phosphate
  modified_base 12: mod_base = OTHER; note = 2'-fluoroguanosine-3'-phosphate
  modified_base 13: mod_base = OTHER; note = 2'-O-methylguanosine-3'-phosphate
  modified_base 14: mod_base = OTHER; note = 2'-fluoroadenosine-3'-phosphate
  modified_base 15: mod_base = OTHER; note = 2'-O-methyluridine-3'-phosphate
  modified_base 16: mod_base = OTHER; note = 2'-fluorouridine-3'-phosphate
  modified_base 17: mod_base = OTHER; note = 2'-O-methylguanosine-3'-phosphate
  modified_base 18: mod_base = OTHER; note = 2'-fluoroguanosine-3'-phosphate
  modified_base 19: mod_base = OTHER; note = 2'-O-methylguanosine-3'-phosphorothioate
  modified_base 20: mod_base = OTHER; note = 2'-O-methyluridine-3'-phosphorothioate
  modified_base 21: mod_base = OTHER; note = 2'-O-methylguanosine
atccaaaacgtggattgggtg

SEQ ID NO: 1145 - RNA, 21 nt, synthetic construct
  source 1..21: mol_type = other RNA
  modified_base 1: mod_base = OTHER; note = 5'-phosphate-2'-O-methyladenosine-3'-phosphorothioate
  modified_base 2: mod_base = OTHER; note = 2'-fluoroadenosine-3'-phosphorothioate
  modified_base 3: mod_base = OTHER; note = 2'-O-methyluridine-3'-phosphate
  modified_base 4: mod_base = OTHER; note = 2'-fluorocytidine-3'-phosphate
  modified_base 5: mod_base = OTHER; note = 2'-O-methylcytidine-3'-phosphate
  modified_base 6: mod_base = OTHER; note = 2'-fluoroadenosine-3'-phosphate
  modified_base 7: mod_base = OTHER; note = 2'-O-methyladenosine-3'-phosphate
  modified_base 8: mod_base = OTHER; note = 2'-fluoroadenosine-3'-phosphate
  modified_base 9: mod_base = OTHER; note = 2'-O-methyladenosine-3'-phosphate
  modified_base 10: mod_base = OTHER; note = 2'-fluorocytidine-3'-phosphate
  modified_base 11: mod_base = OTHER; note = 2'-O-methylguanosine-3'-phosphate
  modified_base 12: mod_base = OTHER; note = 2'-fluorouridine-3'-phosphate
  modified_base 13: mod_base = OTHER; note = 2'-O-methylguanosine-3'-phosphate
  modified_base 14: mod_base = OTHER; note = 2'-fluoroguanosine-3'-phosphate
  modified_base 15: mod_base = OTHER; note = 2'-O-methyladenosine-3'-phosphate
  modified_base 16: mod_base = OTHER; note = 2'-fluorouridine-3'-phosphate
  modified_base 17: mod_base = OTHER; note = 2'-O-methyluridine-3'-phosphate
  modified_base 18: mod_base = OTHER; note = 2'-fluoroguanosine-3'-phosphate
  modified_base 19: mod_base = OTHER; note = 2'-O-methylguanosine-3'-phosphorothioate
  modified_base 20: mod_base = OTHER; note = 2'-O-methylguanosine-3'-phosphorothioate
  modified_base 21: mod_base = OTHER; note = 2'-O-methyluridine
aatccaaaacgtggattgggt

SEQ ID NO: 1146 - RNA, 21 nt, synthetic construct
  source 1..21: mol_type = other RNA
  modified_base 1: mod_base = OTHER; note = 5'-phosphate-2'-O-methyluridine-3'-phosphorothioate
  modified_base 2: mod_base = OTHER; note = 2'-fluorocytidine-3'-phosphorothioate
  modified_base 3: mod_base = OTHER; note = 2'-O-methyladenosine-3'-phosphate
  modified_base 4: mod_base = OTHER; note = 2'-fluorouridine-3'-phosphate
  modified_base 5: mod_base = OTHER; note = 2'-O-methylcytidine-3'-phosphate
  modified_base 6: mod_base = OTHER; note = 2'-fluorocytidine-3'-phosphate
  modified_base 7: mod_base = OTHER; note = 2'-O-methyladenosine-3'-phosphate
  modified_base 8: mod_base = OTHER; note = 2'-fluoroadenosine-3'-phosphate
  modified_base 9: mod_base = OTHER; note = 2'-O-methyladenosine-3'-phosphate
  modified_base 10: mod_base = OTHER; note = 2'-fluoroadenosine-3'-phosphate
  modified_base 11: mod_base = OTHER; note = 2'-O-methylcytidine-3'-phosphate
  modified_base 12: mod_base = OTHER; note = 2'-fluoroguanosine-3'-phosphate
  modified_base 13: mod_base = OTHER; note = 2'-O-methyluridine-3'-phosphate
  modified_base 14: mod_base = OTHER; note = 2'-fluoroguanosine-3'-phosphate
  modified_base 15: mod_base = OTHER; note = 2'-O-methylguanosine-3'-phosphate
  modified_base 16: mod_base = OTHER; note = 2'-fluoroadenosine-3'-phosphate
  modified_base 17: mod_base = OTHER; note = 2'-O-methyluridine-3'-phosphate
  modified_base 18: mod_base = OTHER; note = 2'-fluorouridine-3'-phosphate
  modified_base 19: mod_base = OTHER; note = 2'-O-methylguanosine-3'-phosphorothioate
  modified_base 20: mod_base = OTHER; note = 2'-O-methylguanosine-3'-phosphorothioate
  modified_base 21: mod_base = OTHER; note = 2'-O-methylguanosine
tcatccaaaacgtggattggg

SEQ ID NO: 1147 - RNA, 21 nt, synthetic construct
  source 1..21: mol_type = other RNA
  modified_base 1: mod_base = OTHER; note = 5'-phosphate-2'-O-methyluridine-3'-phosphorothioate
  modified_base 2: mod_base = OTHER; note = 2'-fluoroguanosine-3'-phosphorothioate
  modified_base 3: mod_base = OTHER; note = 2'-O-methylcytidine-3'-phosphate
  modified_base 4: mod_base = OTHER; note = 2'-fluoroadenosine-3'-phosphate
  modified_base 5: mod_base = OTHER; note = 2'-O-methyluridine-3'-phosphate
  modified_base 6: mod_base = OTHER; note = 2'-fluorocytidine-3'-phosphate
  modified_base 7: mod_base = OTHER; note = 2'-O-methylcytidine-3'-phosphate
  modified_base 8: mod_base = OTHER; note = 2'-fluoroadenosine-3'-phosphate
  modified_base 9: mod_base = OTHER; note = 2'-O-methyladenosine-3'-phosphate
  modified_base 10: mod_base = OTHER; note = 2'-fluoroadenosine-3'-phosphate
  modified_base 11: mod_base = OTHER; note = 2'-O-methyladenosine-3'-phosphate
  modified_base 12: mod_base = OTHER; note = 2'-fluorocytidine-3'-phosphate
  modified_base 13: mod_base = OTHER; note = 2'-O-methylguanosine-3'-phosphate
  modified_base 14: mod_base = OTHER; note = 2'-fluorouridine-3'-phosphate
  modified_base 15: mod_base = OTHER; note = 2'-O-methylguanosine-3'-phosphate
  modified_base 16: mod_base = OTHER; note = 2'-fluoroguanosine-3'-phosphate
  modified_base 17: mod_base = OTHER; note = 2'-O-methyladenosine-3'-phosphate
  modified_base 18: mod_base = OTHER; note = 2'-fluorouridine-3'-phosphate
  modified_base 19: mod_base = OTHER; note = 2'-O-methyluridine-3'-phosphorothioate
  modified_base 20: mod_base = OTHER; note = 2'-O-methylguanosine-3'-phosphorothioate
  modified_base 21: mod_base = OTHER; note = 2'-O-methylguanosine
tgcatccaaaacgtggattgg

SEQ ID NO: 1148 - RNA, 21 nt, synthetic construct
  source 1..21: mol_type = other RNA
  modified_base 1: mod_base = OTHER; note = 5'-phosphate-2'-O-methyladenosine-3'-phosphorothioate
  modified_base 2: mod_base = OTHER; note = 2'-fluorouridine-3'-phosphorothioate
  modified_base 3: mod_base = OTHER; note = 2'-O-methylguanosine-3'-phosphate
  modified_base 4: mod_base = OTHER; note = 2'-fluorocytidine-3'-phosphate
  modified_base 5: mod_base = OTHER; note = 2'-O-methyladenosine-3'-phosphate
  modified_base 6: mod_base = OTHER; note = 2'-fluorouridine-3'-phosphate
  modified_base 7: mod_base = OTHER; note = 2'-O-methylcytidine-3'-phosphate
  modified_base 8: mod_base = OTHER; note = 2'-fluorocytidine-3'-phosphate
  modified_base 9: mod_base = OTHER; note = 2'-O-methyladenosine-3'-phosphate
  modified_base 10: mod_base = OTHER; note = 2'-fluoroadenosine-3'-phosphate
  modified_base 11: mod_base = OTHER; note = 2'-O-methyladenosine-3'-phosphate
  modified_base 12: mod_base = OTHER; note = 2'-fluoroadenosine-3'-phosphate
  modified_base 13: mod_base = OTHER; note = 2'-O-methylcytidine-3'-phosphate
  modified_base 14: mod_base = OTHER; note = 2'-fluoroguanosine-3'-phosphate
  modified_base 15: mod_base = OTHER; note = 2'-O-methyluridine-3'-phosphate
  modified_base 16: mod_base = OTHER; note = 2'-fluoroguanosine-3'-phosphate
  modified_base 17: mod_base = OTHER; note = 2'-O-methylguanosine-3'-phosphate
  modified_base 18: mod_base = OTHER; note = 2'-fluoroadenosine-3'-phosphate
  modified_base 19: mod_base = OTHER; note = 2'-O-methyluridine-3'-phosphorothioate
  modified_base 20: mod_base = OTHER; note = 2'-O-methyluridine-3'-phosphorothioate
  modified_base 21: mod_base = OTHER; note = 2'-O-methylguanosine
atgcatccaaaacgtggattg

SEQ ID NO: 1149 - RNA, 21 nt, synthetic construct
  source 1..21: mol_type = other RNA
  modified_base 1: mod_base = OTHER; note = 5'-phosphate-2'-O-methyladenosine-3'-phosphorothioate
  modified_base 2: mod_base = OTHER; note = 2'-fluoroadenosine-3'-phosphorothioate
  modified_base 3: mod_base = OTHER; note = 2'-O-methylguanosine-3'-phosphate
  modified_base 4: mod_base = OTHER; note = 2'-fluorouridine-3'-phosphate
  modified_base 5: mod_base = OTHER; note = 2'-O-methylguanosine-3'-phosphate
  modified_base 6: mod_base = OTHER; note = 2'-fluorocytidine-3'-phosphate
  modified_base 7: mod_base = OTHER; note = 2'-O-methyladenosine-3'-phosphate
  modified_base 8: mod_base = OTHER; note = 2'-fluorouridine-3'-phosphate
  modified_base 9: mod_base = OTHER; note = 2'-O-methylcytidine-3'-phosphate
  modified_base 10: mod_base = OTHER; note = 2'-fluorocytidine-3'-phosphate
  modified_base 11: mod_base = OTHER; note = 2'-O-methyladenosine-3'-phosphate
  modified_base 12: mod_base = OTHER; note = 2'-fluoroadenosine-3'-phosphate
  modified_base 13: mod_base = OTHER; note = 2'-O-methyladenosine-3'-phosphate
  modified_base 14: mod_base = OTHER; note = 2'-fluoroadenosine-3'-phosphate
  modified_base 15: mod_base = OTHER; note = 2'-O-methylcytidine-3'-phosphate
  modified_base 16: mod_base = OTHER; note = 2'-fluoroguanosine-3'-phosphate
  modified_base 17: mod_base = OTHER; note = 2'-O-methyluridine-3'-phosphate
  modified_base 18: mod_base = OTHER; note = 2'-fluoroguanosine-3'-phosphate
  modified_base 19: mod_base = OTHER; note = 2'-O-methylguanosine-3'-phosphorothioate
  modified_base 20: mod_base = OTHER; note = 2'-O-methyladenosine-3'-phosphorothioate
  modified_base 21: mod_base = OTHER; note = 2'-O-methyluridine
aagtgcatccaaaacgtggat

SEQ ID NO: 1150 - RNA, 21 nt, synthetic construct
  source 1..21: mol_type = other RNA
  modified_base 1: mod_base = OTHER; note = 5'-phosphate-2'-O-methyluridine-3'-phosphorothioate
  modified_base 2: mod_base = OTHER; note = 2'-fluorocytidine-3'-phosphorothioate
  modified_base 3: mod_base = OTHER; note = 2'-O-methyladenosine-3'-phosphate
  modified_base 4: mod_base = OTHER; note = 2'-fluoroguanosine-3'-phosphate
  modified_base 5: mod_base = OTHER; note = 2'-O-methyluridine-3'-phosphate
  modified_base 6: mod_base = OTHER; note = 2'-fluoroguanosine-3'-phosphate
  modified_base 7: mod_base = OTHER; note = 2'-O-methylcytidine-3'-phosphate
  modified_base 8: mod_base = OTHER; note = 2'-fluoroadenosine-3'-phosphate
  modified_base 9: mod_base = OTHER; note = 2'-O-methyluridine-3'-phosphate
  modified_base 10: mod_base = OTHER; note = 2'-fluorocytidine-3'-phosphate
  modified_base 11: mod_base = OTHER; note = 2'-O-methylcytidine-3'-phosphate
  modified_base 12: mod_base = OTHER; note = 2'-fluoroadenosine-3'-phosphate
  modified_base 13: mod_base = OTHER; note = 2'-O-methyladenosine-3'-phosphate
  modified_base 14: mod_base = OTHER; note = 2'-fluoroadenosine-3'-phosphate
  modified_base 15: mod_base = OTHER; note = 2'-O-methyladenosine-3'-phosphate
  modified_base 16: mod_base = OTHER; note = 2'-fluorocytidine-3'-phosphate
  modified_base 17: mod_base = OTHER; note = 2'-O-methylguanosine-3'-phosphate
  modified_base 18: mod_base = OTHER; note = 2'-fluorouridine-3'-phosphate
  modified_base 19: mod_base = OTHER; note = 2'-O-methylguanosine-3'-phosphorothioate
  modified_base 20: mod_base = OTHER; note = 2'-O-methylguanosine-3'-phosphorothioate
  modified_base 21: mod_base = OTHER; note = 2'-O-methyladenosine
tcagtgcatccaaaacgtgga

SEQ ID NO: 1151 - RNA, 21 nt, synthetic construct
  source 1..21: mol_type = other RNA
  modified_base 1: mod_base = OTHER; note = 5'-phosphate-2'-O-methyladenosine-3'-phosphorothioate
  modified_base 2: mod_base = OTHER; note = 2'-fluorouridine-3'-phosphorothioate
  modified_base 3: mod_base = OTHER; note = 2'-O-methylcytidine-3'-phosphate
  modified_base 4: mod_base = OTHER; note = 2'-fluoroadenosine-3'-phosphate
  modified_base 5: mod_base = OTHER; note = 2'-O-methylguanosine-3'-phosphate
  modified_base 6: mod_base = OTHER; note = 2'-fluorouridine-3'-phosphate
  modified_base 7: mod_base = OTHER; note = 2'-O-methylguanosine-3'-phosphate
  modified_base 8: mod_base = OTHER; note = 2'-fluorocytidine-3'-phosphate
  modified_base 9: mod_base = OTHER; note = 2'-O-methyladenosine-3'-phosphate
  modified_base 10: mod_base = OTHER; note = 2'-fluorouridine-3'-phosphate
  modified_base 11: mod_base = OTHER; note = 2'-O-methylcytidine-3'-phosphate
  modified_base 12: mod_base = OTHER; note = 2'-fluorocytidine-3'-phosphate
  modified_base 13: mod_base = OTHER; note = 2'-O-methyladenosine-3'-phosphate
  modified_base 14: mod_base = OTHER; note = 2'-fluoroadenosine-3'-phosphate
  modified_base 15: mod_base = OTHER; note = 2'-O-methyladenosine-3'-phosphate
  modified_base 16: mod_base = OTHER; note = 2'-fluoroadenosine-3'-phosphate
  modified_base 17: mod_base = OTHER; note = 2'-O-methylcytidine-3'-phosphate
  modified_base 18: mod_base = OTHER; note = 2'-fluoroguanosine-3'-phosphate
  modified_base 19: mod_base = OTHER; note = 2'-O-methyluridine-3'-phosphorothioate
  modified_base 20: mod_base = OTHER; note = 2'-O-methylguanosine-3'-phosphorothioate
  modified_base 21: mod_base = OTHER; note = 2'-O-methylguanosine
atcagtgcatccaaaacgtgg

SEQ ID NO: 1152 - RNA, 21 nt, synthetic construct
  source 1..21: mol_type = other RNA
  modified_base 1: mod_base = OTHER; note = 5'-phosphate-2'-O-methyluridine-3'-phosphorothioate
  modified_base 2: mod_base = OTHER; note = 2'-fluorocytidine-3'-phosphorothioate
  modified_base 3: mod_base = OTHER; note = 2'-O-methyluridine-3'-phosphate
  modified_base 4: mod_base = OTHER; note = 2'-fluorocytidine-3'-phosphate
  modified_base 5: mod_base = OTHER; note = 2'-O-methyladenosine-3'-phosphate
  modified_base 6: mod_base = OTHER; note = 2'-fluoroguanosine-3'-phosphate
  modified_base 7: mod_base = OTHER; note = 2'-O-methyluridine-3'-phosphate
  modified_base 8: mod_base = OTHER; note = 2'-fluoroguanosine-3'-phosphate
  modified_base 9: mod_base = OTHER; note = 2'-O-methylcytidine-3'-phosphate
  modified_base 10: mod_base = OTHER; note = 2'-fluoroadenosine-3'-phosphate
  modified_base 11: mod_base = OTHER; note = 2'-O-methyluridine-3'-phosphate
  modified_base 12: mod_base = OTHER; note = 2'-fluorocytidine-3'-phosphate
  modified_base 13: mod_base = OTHER; note = 2'-O-methylcytidine-3'-phosphate
  modified_base 14: mod_base = OTHER; note = 2'-fluoroadenosine-3'-phosphate
  modified_base 15: mod_base = OTHER; note = 2'-O-methyladenosine-3'-phosphate
  modified_base 16: mod_base = OTHER; note = 2'-fluoroadenosine-3'-phosphate
  modified_base 17: mod_base = OTHER; note = 2'-O-methyladenosine-3'-phosphate
  modified_base 18: mod_base = OTHER; note = 2'-fluorocytidine-3'-phosphate
  modified_base 19: mod_base = OTHER; note = 2'-O-methylguanosine-3'-phosphorothioate
  modified_base 20: mod_base = OTHER; note = 2'-O-methyluridine-3'-phosphorothioate
  modified_base 21: mod_base = OTHER; note = 2'-O-methylguanosine
tctcagtgcatccaaaacgtg

SEQ ID NO: 1153 - RNA, 21 nt, synthetic construct
  source 1..21: mol_type = other RNA
  modified_base 1: mod_base = OTHER; note = 5'-phosphate-2'-O-methyladenosine-3'-phosphorothioate
  modified_base 2: mod_base = OTHER; note = 2'-fluorouridine-3'-phosphorothioate
  modified_base 3: mod_base = OTHER; note = 2'-O-methylcytidine-3'-phosphate
  modified_base 4: mod_base = OTHER; note = 2'-fluorouridine-3'-phosphate
  modified_base 5: mod_base = OTHER; note = 2'-O-methylcytidine-3'-phosphate
  modified_base 6: mod_base = OTHER; note = 2'-fluoroadenosine-3'-phosphate
  modified_base 7: mod_base = OTHER; note = 2'-O-methylguanosine-3'-phosphate
  modified_base 8: mod_base = OTHER; note = 2'-fluorouridine-3'-phosphate
  modified_base 9: mod_base = OTHER; note = 2'-O-methylguanosine-3'-phosphate
  modified_base 10: mod_base = OTHER; note = 2'-fluorocytidine-3'-phosphate
  modified_base 11: mod_base = OTHER; note = 2'-O-methyladenosine-3'-phosphate
  modified_base 12: mod_base = OTHER; note = 2'-fluorouridine-3'-phosphate
  modified_base 13: mod_base = OTHER; note = 2'-O-methylcytidine-3'-phosphate
  modified_base 14: mod_base = OTHER; note = 2'-fluorocytidine-3'-phosphate
  modified_base 15: mod_base = OTHER; note = 2'-O-methyladenosine-3'-phosphate
  modified_base 16: mod_base = OTHER; note = 2'-fluoroadenosine-3'-phosphate
  modified_base 17: mod_base = OTHER; note = 2'-O-methyladenosine-3'-phosphate
  modified_base 18: mod_base = OTHER; note = 2'-fluoroadenosine-3'-phosphate
  modified_base 19: mod_base = OTHER; note = 2'-O-methylcytidine-3'-phosphorothioate
  modified_base 20: mod_base = OTHER; note = 2'-O-methylguanosine-3'-phosphorothioate
  modified_base 21: mod_base = OTHER; note = 2'-O-methyluridine
atctcagtgcatccaaaacgt

SEQ ID NO: 1154 - RNA, 21 nt, synthetic construct
  source 1..21: mol_type = other RNA
  modified_base 1: mod_base = OTHER; note = 5'-phosphate-2'-O-methyladenosine-3'-phosphorothioate
  modified_base 2: mod_base = OTHER; note = 2'-fluoroguanosine-3'-phosphorothioate
  modified_base 3: mod_base = OTHER; note = 2'-O-methyluridine-3'-phosphate
  modified_base 4: mod_base = OTHER; note = 2'-fluorocytidine-3'-phosphate
  modified_base 5: mod_base = OTHER; note = 2'-O-methyluridine-3'-phosphate
  modified_base 6: mod_base = OTHER; note = 2'-fluorocytidine-3'-phosphate
  modified_base 7: mod_base = OTHER; note = 2'-O-methyladenosine-3'-phosphate
  modified_base 8: mod_base = OTHER; note = 2'-fluoroguanosine-3'-phosphate
  modified_base 9: mod_base = OTHER; note = 2'-O-methyluridine-3'-phosphate
  modified_base 10: mod_base = OTHER; note = 2'-fluoroguanosine-3'-phosphate
  modified_base 11: mod_base = OTHER; note = 2'-O-methylcytidine-3'-phosphate
  modified_base 12: mod_base = OTHER; note = 2'-fluoroadenosine-3'-phosphate
  modified_base 13: mod_base = OTHER; note = 2'-O-methyluridine-3'-phosphate
  modified_base 14: mod_base = OTHER; note = 2'-fluorocytidine-3'-phosphate
  modified_base 15: mod_base = OTHER; note = 2'-O-methylcytidine-3'-phosphate
  modified_base 16: mod_base = OTHER; note = 2'-fluoroadenosine-3'-phosphate
  modified_base 17: mod_base = OTHER; note = 2'-O-methyladenosine-3'-phosphate
  modified_base 18: mod_base = OTHER; note = 2'-fluoroadenosine-3'-phosphate
  modified_base 19: mod_base = OTHER; note = 2'-O-methyladenosine-3'-phosphorothioate
  modified_base 20: mod_base = OTHER; note = 2'-O-methylcytidine-3'-phosphorothioate
  modified_base 21: mod_base = OTHER; note = 2'-O-methylguanosine
agtctcagtgcatccaaaacg

SEQ ID NO: 1155 - RNA, 21 nt, synthetic construct
  source 1..21: mol_type = other RNA
  modified_base 1: mod_base = OTHER; note 5'-(E)-vinylphosphonate-2'-O-methyluridine-3'-phosphorothio ate
  modified_base 2: mod_base = OTHER; note = 2'-fluoroadenosine-3'-phosphorothioate
  modified_base 3: mod_base = OTHER; note = 2'-O-methylguanosine-3'-phosphate
  modified_base 4: mod_base = OTHER; note = 2'-fluoroadenosine-3'-phosphate
  modified_base 5: mod_base = OTHER; note = 2'-O-methylcytidine-3'-phosphate
  modified_base 6: mod_base = OTHER; note = 2'-fluoroadenosine-3'-phosphate
  modified_base 7: mod_base = OTHER; note = 2'-O-methyladenosine-3'-phosphate
  modified_base 8: mod_base = OTHER; note = 2'-fluorouridine-3'-phosphate
  modified_base 9: mod_base = OTHER; note = 2'-O-methyladenosine-3'-phosphate
  modified_base 10: mod_base = OTHER; note = 2'-fluoroadenosine-3'-phosphate
  modified_base 11: mod_base = OTHER; note = 2'-O-methyladenosine-3'-phosphate
  modified_base 12: mod_base = OTHER; note = 2'-fluorouridine-3'-phosphate
  modified_base 13: mod_base = OTHER; note = 2'-O-methyladenosine-3'-phosphate
  modified_base 14: mod_base = OTHER; note = 2'-fluorocytidine-3'-phosphate
  modified_base 15: mod_base = OTHER; note = 2'-O-methylcytidine-3'-phosphate
  modified_base 16: mod_base = OTHER; note = 2'-fluoroguanosine-3'-phosphate
  modified_base 17: mod_base = OTHER; note = 2'-O-methyladenosine-3'-phosphate
  modified_base 18: mod_base = OTHER; note = 2'-fluoroguanosine-3'-phosphate
  modified_base 19: mod_base = OTHER; note = 2'-O-methylguanosine-3'-phosphorothioate
  modified_base 20: mod_base = OTHER; note = 2'-O-methyladenosine-3'-phosphorothioate
  modified_base 21: mod_base = OTHER; note = 2'-O-methyladenosine
tagacaataaataccgaggaa

SEQ ID NO: 1156 - RNA, 21 nt, synthetic construct
  source 1..21: mol_type = other RNA
  modified_base 1: mod_base = OTHER; note = 5'-phosphate-2'-O-methyluridine-3'-phosphorothioate
  modified_base 2: mod_base = OTHER; note = 2'-fluorouridine-3'-phosphorothioate
  modified_base 3: mod_base = OTHER; note = 2'-O-methyluridine-3'-phosphate
  modified_base 4: mod_base = OTHER; note = 2'-fluoroadenosine-3'-phosphate
  modified_base 5: mod_base = OTHER; note = 2'-O-methyluridine-3'-phosphate
  modified_base 6: mod_base = OTHER; note = 2'-fluorouridine-3'-phosphate
  modified_base 7: mod_base = OTHER; note = 2'-O-methylcytidine-3'-phosphate
  modified_base 8: mod_base = OTHER; note = 2'-fluoroguanosine-3'-phosphate
  modified_base 9: mod_base = OTHER; note = 2'-O-methylcytidine-3'-phosphate
  modified_base 10: mod_base = OTHER; note = 2'-fluoroguanosine-3'-phosphate
  modified_base 11: mod_base = OTHER; note = 2'-O-methyladenosine-3'-phosphate
  modified_base 12: mod_base = OTHER; note = 2'-fluoroguanosine-3'-phosphate
  modified_base 13: mod_base = OTHER; note = 2'-O-methylguanosine-3'-phosphate
  modified_base 14: mod_base = OTHER; note = 2'-fluoroguanosine-3'-phosphate
  modified_base 15: mod_base = OTHER; note = 2'-O-methyluridine-3'-phosphate
  modified_base 16: mod_base = OTHER; note = 2'-fluorocytidine-3'-phosphate
  modified_base 17: mod_base = OTHER; note = 2'-O-methylguanosine-3'-phosphate
  modified_base 18: mod_base = OTHER; note = 2'-fluoroguanosine-3'-phosphate
  modified_base 19: mod_base = OTHER; note = 2'-O-methylguanosine-3'-phosphorothioate
  modified_base 20: mod_base = OTHER; note = 2'-O-methyluridine-3'-phosphorothioate
  modified_base 21: mod_base = OTHER; note = 2'-O-methylguanosine
tttattcgcgagggtcgggtg

SEQ ID NO: 1157 - RNA, 21 nt, synthetic construct
  source 1..21: mol_type = other RNA
  modified_base 1: mod_base = OTHER; note = 5'-phosphate-2'-O-methyluridine-3'-phosphorothioate
  modified_base 2: mod_base = OTHER; note = 2'-fluorouridine-3'-phosphorothioate
  modified_base 3: mod_base = OTHER; note = 2'-O-methyluridine-3'-phosphate
  modified_base 4: mod_base = OTHER; note = 2'-fluorouridine-3'-phosphate
  modified_base 5: mod_base = OTHER; note = 2'-O-methyladenosine-3'-phosphate
  modified_base 6: mod_base = OTHER; note = 2'-fluorouridine-3'-phosphate
  modified_base 7: mod_base = OTHER; note = 2'-O-methyluridine-3'-phosphate
  modified_base 8: mod_base = OTHER; note = 2'-fluorocytidine-3'-phosphate
  modified_base 9: mod_base = OTHER; note = 2'-O-methylguanosine-3'-phosphate
  modified_base 10: mod_base = OTHER; note = 2'-fluorocytidine-3'-phosphate
  modified_base 11: mod_base = OTHER; note = 2'-O-methylguanosine-3'-phosphate
  modified_base 12: mod_base = OTHER; note = 2'-fluoroadenosine-3'-phosphate
  modified_base 13: mod_base = OTHER; note = 2'-O-methylguanosine-3'-phosphate
  modified_base 14: mod_base = OTHER; note = 2'-fluoroguanosine-3'-phosphate
  modified_base 15: mod_base = OTHER; note = 2'-O-methylguanosine-3'-phosphate
  modified_base 16: mod_base = OTHER; note = 2'-fluorouridine-3'-phosphate
  modified_base 17: mod_base = OTHER; note = 2'-O-methylcytidine-3'-phosphate
  modified_base 18: mod_base = OTHER; note = 2'-fluoroguanosine-3'-phosphate
  modified_base 19: mod_base = OTHER; note = 2'-O-methylguanosine-3'-phosphorothioate
  modified_base 20: mod_base = OTHER; note = 2'-O-methylguanosine-3'-phosphorothioate
  modified_base 21: mod_base = OTHER; note = 2'-O-methyluridine
ttttattcgcgagggtcgggt

SEQ ID NO: 1158 - RNA, 21 nt, synthetic construct
  source 1..21: mol_type = other RNA
  modified_base 1: mod_base = OTHER; note = 5'-phosphate-2'-O-methyladenosine-3'-phosphorothioate
  modified_base 2: mod_base = OTHER; note = 2'-fluorouridine-3'-phosphorothioate
  modified_base 3: mod_base = OTHER; note = 2'-O-methyluridine-3'-phosphate
  modified_base 4: mod_base = OTHER; note = 2'-fluorouridine-3'-phosphate
  modified_base 5: mod_base = OTHER; note = 2'-O-methyluridine-3'-phosphate
  modified_base 6: mod_base = OTHER; note = 2'-fluoroadenosine-3'-phosphate
  modified_base 7: mod_base = OTHER; note = 2'-O-methyluridine-3'-phosphate
  modified_base 8: mod_base = OTHER; note = 2'-fluorouridine-3'-phosphate
  modified_base 9: mod_base = OTHER; note = 2'-O-methylcytidine-3'-phosphate
  modified_base 10: mod_base = OTHER; note = 2'-fluoroguanosine-3'-phosphate
  modified_base 11: mod_base = OTHER; note = 2'-O-methylcytidine-3'-phosphate
  modified_base 12: mod_base = OTHER; note = 2'-fluoroguanosine-3'-phosphate
  modified_base 13: mod_base = OTHER; note = 2'-O-methyladenosine-3'-phosphate
  modified_base 14: mod_base = OTHER; note = 2'-fluoroguanosine-3'-phosphate
  modified_base 15: mod_base = OTHER; note = 2'-O-methylguanosine-3'-phosphate
  modified_base 16: mod_base = OTHER; note = 2'-fluoroguanosine-3'-phosphate
  modified_base 17: mod_base = OTHER; note = 2'-O-methyluridine-3'-phosphate
  modified_base 18: mod_base = OTHER; note = 2'-fluorocytidine-3'-phosphate
  modified_base 19: mod_base = OTHER; note = 2'-O-methylguanosine-3'-phosphorothioate
  modified_base 20: mod_base = OTHER; note = 2'-O-methylguanosine-3'-phosphorothioate
  modified_base 21: mod_base = OTHER; note = 2'-O-methylguanosine
attttattcgcgagggtcggg

SEQ ID NO: 1159 - RNA, 21 nt, synthetic construct
  source 1..21: mol_type = other RNA
  modified_base 1: mod_base = OTHER; note = 5'-phosphate-2'-O-methyladenosine-3'-phosphorothioate
  modified_base 2: mod_base = OTHER; note = 2'-fluorocytidine-3'-phosphorothioate
  modified_base 3: mod_base = OTHER; note = 2'-O-methyluridine-3'-phosphate
  modified_base 4: mod_base = OTHER; note = 2'-fluorouridine-3'-phosphate
  modified_base 5: mod_base = OTHER; note = 2'-O-methyluridine-3'-phosphate
  modified_base 6: mod_base = OTHER; note = 2'-fluorouridine-3'-phosphate
  modified_base 7: mod_base = OTHER; note = 2'-O-methyladenosine-3'-phosphate
  modified_base 8: mod_base = OTHER; note = 2'-fluorouridine-3'-phosphate
  modified_base 9: mod_base = OTHER; note = 2'-O-methyluridine-3'-phosphate
  modified_base 10: mod_base = OTHER; note = 2'-fluorocytidine-3'-phosphate
  modified_base 11: mod_base = OTHER; note = 2'-O-methylguanosine-3'-phosphate
  modified_base 12: mod_base = OTHER; note = 2'-fluorocytidine-3'-phosphate
  modified_base 13: mod_base = OTHER; note = 2'-O-methylguanosine-3'-phosphate
  modified_base 14: mod_base = OTHER; note = 2'-fluoroadenosine-3'-phosphate
  modified_base 15: mod_base = OTHER; note = 2'-O-methylguanosine-3'-phosphate
  modified_base 16: mod_base = OTHER; note = 2'-fluoroguanosine-3'-phosphate
  modified_base 17: mod_base = OTHER; note = 2'-O-methylguanosine-3'-phosphate
  modified_base 18: mod_base = OTHER; note = 2'-fluorouridine-3'-phosphate
  modified_base 19: mod_base = OTHER; note = 2'-O-methylcytidine-3'-phosphorothioate
  modified_base 20: mod_base = OTHER; note = 2'-O-methylguanosine-3'-phosphorothioate
  modified_base 21: mod_base = OTHER; note = 2'-O-methylguanosine
acttttattcgcgagggtcgg

SEQ ID NO: 1160 - RNA, 21 nt, synthetic construct
  source 1..21: mol_type = other RNA
  modified_base 1: mod_base = OTHER; note = 5'-phosphate-2'-O-methyladenosine-3'-phosphorothioate
  modified_base 2: mod_base = OTHER; note = 2'-fluorocytidine-3'-phosphorothioate
  modified_base 3: mod_base = OTHER; note = 2'-O-methylcytidine-3'-phosphate
  modified_base 4: mod_base = OTHER; note = 2'-fluorouridine-3'-phosphate
  modified_base 5: mod_base = OTHER; note = 2'-O-methyluridine-3'-phosphate
  modified_base 6: mod_base = OTHER; note = 2'-fluorouridine-3'-phosphate
  modified_base 7: mod_base = OTHER; note = 2'-O-methyluridine-3'-phosphate
  modified_base 8: mod_base = OTHER; note = 2'-fluoroadenosine-3'-phosphate
  modified_base 9: mod_base = OTHER; note = 2'-O-methyluridine-3'-phosphate
  modified_base 10: mod_base = OTHER; note = 2'-fluorouridine-3'-phosphate
  modified_base 11: mod_base = OTHER; note = 2'-O-methylcytidine-3'-phosphate
  modified_base 12: mod_base = OTHER; note = 2'-fluoroguanosine-3'-phosphate
  modified_base 13: mod_base = OTHER; note = 2'-O-methylcytidine-3'-phosphate
  modified_base 14: mod_base = OTHER; note = 2'-fluoroguanosine-3'-phosphate
  modified_base 15: mod_base = OTHER; note = 2'-O-methyladenosine-3'-phosphate
  modified_base 16: mod_base = OTHER; note = 2'-fluoroguanosine-3'-phosphate
  modified_base 17: mod_base = OTHER; note = 2'-O-methylguanosine-3'-phosphate
  modified_base 18: mod_base = OTHER; note = 2'-fluoroguanosine-3'-phosphate
  modified_base 19: mod_base = OTHER; note = 2'-O-methyluridine-3'-phosphorothioate
  modified_base 20: mod_base = OTHER; note = 2'-O-methylcytidine-3'-phosphorothioate
  modified_base 21: mod_base = OTHER; note = 2'-O-methylguanosine
accttttattcgcgagggtcg

SEQ ID NO: 1161 - RNA, 21 nt, synthetic construct
  source 1..21: mol_type = other RNA
  modified_base 1: mod_base = OTHER; note = 5'-phosphate-2'-O-methyladenosine-3'-phosphorothioate
  modified_base 2: mod_base = OTHER; note = 2'-fluoroguanosine-3'-phosphorothioate
  modified_base 3: mod_base = OTHER; note = 2'-O-methylcytidine-3'-phosphate
  modified_base 4: mod_base = OTHER; note = 2'-fluorocytidine-3'-phosphate
  modified_base 5: mod_base = OTHER; note = 2'-O-methyluridine-3'-phosphate
  modified_base 6: mod_base = OTHER; note = 2'-fluorouridine-3'-phosphate
  modified_base 7: mod_base = OTHER; note = 2'-O-methyluridine-3'-phosphate
  modified_base 8: mod_base = OTHER; note = 2'-fluorouridine-3'-phosphate
  modified_base 9: mod_base = OTHER; note = 2'-O-methyladenosine-3'-phosphate
  modified_base 10: mod_base = OTHER; note = 2'-fluorouridine-3'-phosphate
  modified_base 11: mod_base = OTHER; note = 2'-O-methyluridine-3'-phosphate
  modified_base 12: mod_base = OTHER; note = 2'-fluorocytidine-3'-phosphate
  modified_base 13: mod_base = OTHER; note = 2'-O-methylguanosine-3'-phosphate
  modified_base 14: mod_base = OTHER; note = 2'-fluorocytidine-3'-phosphate
  modified_base 15: mod_base = OTHER; note = 2'-O-methylguanosine-3'-phosphate
  modified_base 16: mod_base = OTHER; note = 2'-fluoroadenosine-3'-phosphate
  modified_base 17: mod_base = OTHER; note = 2'-O-methylguanosine-3'-phosphate
  modified_base 18: mod_base = OTHER; note = 2'-fluoroguanosine-3'-phosphate
  modified_base 19: mod_base = OTHER; note = 2'-O-methylguanosine-3'-phosphorothioate
  modified_base 20: mod_base = OTHER; note = 2'-O-methyluridine-3'-phosphorothioate
  modified_base 21: mod_base = OTHER; note = 2'-O-methylcytidine
agccttttattcgcgagggtc

SEQ ID NO: 1162 - RNA, 21 nt, synthetic construct
  source 1..21: mol_type = other RNA
  modified_base 1: mod_base = OTHER; note = 5'-phosphate-2'-O-methyluridine-3'-phosphorothioate
  modified_base 2: mod_base = OTHER; note = 2'-fluoroadenosine-3'-phosphorothioate
  modified_base 3: mod_base = OTHER; note = 2'-O-methylguanosine-3'-phosphate
  modified_base 4: mod_base = OTHER; note = 2'-fluoroguanosine-3'-phosphate
  modified_base 5: mod_base = OTHER; note = 2'-O-methylguanosine-3'-phosphate
  modified_base 6: mod_base = OTHER; note = 2'-fluorocytidine-3'-phosphate
  modified_base 7: mod_base = OTHER; note = 2'-O-methylcytidine-3'-phosphate
  modified_base 8: mod_base = OTHER; note = 2'-fluorouridine-3'-phosphate
  modified_base 9: mod_base = OTHER; note = 2'-O-methyluridine-3'-phosphate
  modified_base 10: mod_base = OTHER; note = 2'-fluorouridine-3'-phosphate
  modified_base 11: mod_base = OTHER; note = 2'-O-methyluridine-3'-phosphate
  modified_base 12: mod_base = OTHER; note = 2'-fluoroadenosine-3'-phosphate
  modified_base 13: mod_base = OTHER; note = 2'-O-methyluridine-3'-phosphate
  modified_base 14: mod_base = OTHER; note = 2'-fluorouridine-3'-phosphate
  modified_base 15: mod_base = OTHER; note = 2'-O-methylcytidine-3'-phosphate
  modified_base 16: mod_base = OTHER; note = 2'-fluoroguanosine-3'-phosphate
  modified_base 17: mod_base = OTHER; note = 2'-O-methylcytidine-3'-phosphate
  modified_base 18: mod_base = OTHER; note = 2'-fluoroguanosine-3'-phosphate
  modified_base 19: mod_base = OTHER; note = 2'-O-methyladenosine-3'-phosphorothioate
  modified_base 20: mod_base = OTHER; note = 2'-O-methylguanosine-3'-phosphorothioate
  modified_base 21: mod_base = OTHER; note = 2'-O-methylguanosine
tagggccttttattcgcgagg

SEQ ID NO: 1163 - RNA, 21 nt, synthetic construct
  source 1..21: mol_type = other RNA
  modified_base 1: mod_base = OTHER; note = 5'-phosphate-2'-O-methyluridine-3'-phosphorothioate
  modified_base 2: mod_base = OTHER; note = 2'-fluoroguanosine-3'-phosphorothioate
  modified_base 3: mod_base = OTHER; note = 2'-O-methyladenosine-3'-phosphate
  modified_base 4: mod_base = OTHER; note = 2'-fluoroguanosine-3'-phosphate
  modified_base 5: mod_base = OTHER; note = 2'-O-methylguanosine-3'-phosphate
  modified_base 6: mod_base = OTHER; note = 2'-fluoroguanosine-3'-phosphate
  modified_base 7: mod_base = OTHER; note = 2'-O-methylcytidine-3'-phosphate
  modified_base 8: mod_base = OTHER; note = 2'-fluorocytidine-3'-phosphate
  modified_base 9: mod_base = OTHER; note = 2'-O-methyluridine-3'-phosphate
  modified_base 10: mod_base = OTHER; note = 2'-fluorouridine-3'-phosphate
  modified_base 11: mod_base = OTHER; note = 2'-O-methyluridine-3'-phosphate
  modified_base 12: mod_base = OTHER; note = 2'-fluorouridine-3'-phosphate
  modified_base 13: mod_base = OTHER; note = 2'-O-methyladenosine-3'-phosphate
  modified_base 14: mod_base = OTHER; note = 2'-fluorouridine-3'-phosphate
  modified_base 15: mod_base = OTHER; note = 2'-O-methyluridine-3'-phosphate
  modified_base 16: mod_base = OTHER; note = 2'-fluorocytidine-3'-phosphate
  modified_base 17: mod_base = OTHER; note = 2'-O-methylguanosine-3'-phosphate
  modified_base 18: mod_base = OTHER; note = 2'-fluorocytidine-3'-phosphate
  modified_base 19: mod_base = OTHER; note = 2'-O-methylguanosine-3'-phosphorothioate
  modified_base 20: mod_base = OTHER; note = 2'-O-methyladenosine-3'-phosphorothioate
  modified_base 21: mod_base = OTHER; note = 2'-O-methylguanosine
tgagggccttttattcgcgag

SEQ ID NO: 1164 - RNA, 21 nt, synthetic construct
  source 1..21: mol_type = other RNA
  modified_base 1: mod_base = OTHER; note = 5'-phosphate-2'-O-methyluridine-3'-phosphorothioate
  modified_base 2: mod_base = OTHER; note = 2'-fluoroguanosine-3'-phosphorothioate
  modified_base 3: mod_base = OTHER; note = 2'-O-methylguanosine-3'-phosphate
  modified_base 4: mod_base = OTHER; note = 2'-fluoroadenosine-3'-phosphate
  modified_base 5: mod_base = OTHER; note = 2'-O-methylguanosine-3'-phosphate
  modified_base 6: mod_base = OTHER; note = 2'-fluoroguanosine-3'-phosphate
  modified_base 7: mod_base = OTHER; note = 2'-O-methylguanosine-3'-phosphate
  modified_base 8: mod_base = OTHER; note = 2'-fluorocytidine-3'-phosphate
  modified_base 9: mod_base = OTHER; note = 2'-O-methylcytidine-3'-phosphate
  modified_base 10: mod_base = OTHER; note = 2'-fluorouridine-3'-phosphate
  modified_base 11: mod_base = OTHER; note = 2'-O-methyluridine-3'-phosphate
  modified_base 12: mod_base = OTHER; note = 2'-fluorouridine-3'-phosphate
  modified_base 13: mod_base = OTHER; note = 2'-O-methyluridine-3'-phosphate
  modified_base 14: mod_base = OTHER; note = 2'-fluoroadenosine-3'-phosphate
  modified_base 15: mod_base = OTHER; note = 2'-O-methyluridine-3'-phosphate
  modified_base 16: mod_base = OTHER; note = 2'-fluorouridine-3'-phosphate
  modified_base 17: mod_base = OTHER; note = 2'-O-methylcytidine-3'-phosphate
  modified_base 18: mod_base = OTHER; note = 2'-fluoroguanosine-3'-phosphate
  modified_base 19: mod_base = OTHER; note = 2'-O-methylcytidine-3'-phosphorothioate
  modified_base 20: mod_base = OTHER; note = 2'-O-methylguanosine-3'-phosphorothioate
  modified_base 21: mod_base = OTHER; note = 2'-O-methyladenosine
tggagggccttttattcgcga

SEQ ID NO: 1165 - RNA, 21 nt, synthetic construct
  source 1..21: mol_type = other RNA
  modified_base 1: mod_base = OTHER; note = 5'-phosphate-2'-O-methyladenosine-3'-phosphorothioate
  modified_base 2: mod_base = OTHER; note = 2'-fluorouridine-3'-phosphorothioate
  modified_base 3: mod_base = OTHER; note = 2'-O-methylguanosine-3'-phosphate
  modified_base 4: mod_base = OTHER; note = 2'-fluoroguanosine-3'-phosphate
  modified_base 5: mod_base = OTHER; note = 2'-O-methyladenosine-3'-phosphate
  modified_base 6: mod_base = OTHER; note = 2'-fluoroguanosine-3'-phosphate
  modified_base 7: mod_base = OTHER; note = 2'-O-methylguanosine-3'-phosphate
  modified_base 8: mod_base = OTHER; note = 2'-fluoroguanosine-3'-phosphate
  modified_base 9: mod_base = OTHER; note = 2'-O-methylcytidine-3'-phosphate
  modified_base 10: mod_base = OTHER; note = 2'-fluorocytidine-3'-phosphate
  modified_base 11: mod_base = OTHER; note = 2'-O-methyluridine-3'-phosphate
  modified_base 12: mod_base = OTHER; note = 2'-fluorouridine-3'-phosphate
  modified_base 13: mod_base = OTHER; note = 2'-O-methyluridine-3'-phosphate
  modified_base 14: mod_base = OTHER; note = 2'-fluorouridine-3'-phosphate
  modified_base 15: mod_base = OTHER; note = 2'-O-methyladenosine-3'-phosphate
  modified_base 16: mod_base = OTHER; note = 2'-fluorouridine-3'-phosphate
  modified_base 17: mod_base = OTHER; note = 2'-O-methyluridine-3'-phosphate
  modified_base 18: mod_base = OTHER; note = 2'-fluorocytidine-3'-phosphate
  modified_base 19: mod_base = OTHER; note = 2'-O-methylguanosine-3'-phosphorothioate
  modified_base 20: mod_base = OTHER; note = 2'-O-methylcytidine-3'-phosphorothioate
  modified_base 21: mod_base = OTHER; note = 2'-O-methylguanosine
atggagggccttttattcgcg

SEQ ID NO: 1166 - RNA, 21 nt, synthetic construct
  source 1..21: mol_type = other RNA
  modified_base 1: mod_base = OTHER; note = 5'-phosphate-2'-O-methyladenosine-3'-phosphorothioate
  modified_base 2: mod_base = OTHER; note = 2'-fluoroadenosine-3'-phosphorothioate
  modified_base 3: mod_base = OTHER; note = 2'-O-methyluridine-3'-phosphate
  modified_base 4: mod_base = OTHER; note = 2'-fluoroguanosine-3'-phosphate
  modified_base 5: mod_base = OTHER; note = 2'-O-methylguanosine-3'-phosphate
  modified_base 6: mod_base = OTHER; note = 2'-fluoroadenosine-3'-phosphate
  modified_base 7: mod_base = OTHER; note = 2'-O-methylguanosine-3'-phosphate
  modified_base 8: mod_base = OTHER; note = 2'-fluoroguanosine-3'-phosphate
  modified_base 9: mod_base = OTHER; note = 2'-O-methylguanosine-3'-phosphate
  modified_base 10: mod_base = OTHER; note = 2'-fluorocytidine-3'-phosphate
  modified_base 11: mod_base = OTHER; note = 2'-O-methylcytidine-3'-phosphate
  modified_base 12: mod_base = OTHER; note = 2'-fluorouridine-3'-phosphate
  modified_base 13: mod_base = OTHER; note = 2'-O-methyluridine-3'-phosphate
  modified_base 14: mod_base = OTHER; note = 2'-fluorouridine-3'-phosphate
  modified_base 15: mod_base = OTHER; note = 2'-O-methyluridine-3'-phosphate
  modified_base 16: mod_base = OTHER; note = 2'-fluoroadenosine-3'-phosphate
  modified_base 17: mod_base = OTHER; note = 2'-O-methyluridine-3'-phosphate
  modified_base 18: mod_base = OTHER; note = 2'-fluorouridine-3'-phosphate
  modified_base 19: mod_base = OTHER; note = 2'-O-methylcytidine-3'-phosphorothioate
  modified_base 20: mod_base = OTHER; note = 2'-O-methylguanosine-3'-phosphorothioate
  modified_base 21: mod_base = OTHER; note = 2'-O-methylcytidine
aatggagggccttttattcgc

SEQ ID NO: 1167 - RNA, 19 nt, synthetic construct
  source 1..19: mol_type = other RNA
  modified_base 1: mod_base = OTHER; note = 2'-fluorocytidine-3'-phosphorothioate
  modified_base 2: mod_base = OTHER; note = 2'-O-methylcytidine-3'-phosphorothioate
  modified_base 3: mod_base = OTHER; note = 2'-fluorouridine-3'-phosphate
  modified_base 4: mod_base = OTHER; note = 2'-O-methylcytidine-3'-phosphate
  modified_base 5: mod_base = OTHER; note = 2'-fluoroguanosine-3'-phosphate
  modified_base 6: mod_base = OTHER; note = 2'-O-methylguanosine-3'-phosphate
  modified_base 7: mod_base = OTHER; note = 2'-fluorouridine-3'-phosphate
  modified_base 8: mod_base = OTHER; note = 2'-O-methyladenosine-3'-phosphate
  modified_base 9: mod_base = OTHER; note = 2'-fluorouridine-3'-phosphate
  modified_base 10: mod_base = OTHER; note = 2'-O-methyluridine-3'-phosphate
  modified_base 11: mod_base = OTHER; note = 2'-fluorouridine-3'-phosphate
  modified_base 12: mod_base = OTHER; note = 2'-O-methyladenosine-3'-phosphate
  modified_base 13: mod_base = OTHER; note = 2'-fluorouridine-3'-phosphate
  modified_base 14: mod_base = OTHER; note = 2'-O-methyluridine-3'-phosphate
  modified_base 15: mod_base = OTHER; note = 2'-fluoroguanosine-3'-phosphate
  modified_base 16: mod_base = OTHER; note = 2'-O-methyluridine-3'-phosphate
  modified_base 17: mod_base = OTHER; note = 2'-fluorocytidine-3'-phosphorothioate
  modified_base 18: mod_base = OTHER; note = 2'-O-methyluridine-3'-phosphorothioate
  modified_base 19: mod_base = OTHER; note 2'-fluoroadenosine-3'-phosphate-N,N'-((5S)-6-((6-hydroxy-5- (lambda-3-methyl)hexyl)amino)-6-oxohexane-1,5-diyl)ditetrad ecanamide
cctcggtatttattgtcta

SEQ ID NO: 1168 - RNA, 19 nt, synthetic construct
  source 1..19: mol_type = other RNA
  modified_base 1: mod_base = OTHER; note = 2'-fluorocytidine-3'-phosphorothioate
  modified_base 2: mod_base = OTHER; note = 2'-O-methylcytidine-3'-phosphorothioate
  modified_base 3: mod_base = OTHER; note = 2'-fluoroadenosine-3'-phosphate
  modified_base 4: mod_base = OTHER; note = 2'-O-methylguanosine-3'-phosphate
  modified_base 5: mod_base = OTHER; note = 2'-fluoroguanosine-3'-phosphate
  modified_base 6: mod_base = OTHER; note = 2'-O-methyladenosine-3'-phosphate
  modified_base 7: mod_base = OTHER; note = 2'-fluorouridine-3'-phosphate
  modified_base 8: mod_base = OTHER; note = 2'-O-methylguanosine-3'-phosphate
  modified_base 9: mod_base = OTHER; note = 2'-fluoroadenosine-3'-phosphate
  modified_base 10: mod_base = OTHER; note = 2'-O-methylguanosine-3'-phosphate
  modified_base 11: mod_base = OTHER; note = 2'-fluoroadenosine-3'-phosphate
  modified_base 12: mod_base = OTHER; note = 2'-O-methyladenosine-3'-phosphate
  modified_base 13: mod_base = OTHER; note = 2'-fluorocytidine-3'-phosphate
  modified_base 14: mod_base = OTHER; note = 2'-O-methyluridine-3'-phosphate
  modified_base 15: mod_base = OTHER; note = 2'-fluoroadenosine-3'-phosphate
  modified_base 16: mod_base = OTHER; note = 2'-O-methylcytidine-3'-phosphate
  modified_base 17: mod_base = OTHER; note = 2'-fluorocytidine-3'-phosphorothioate
  modified_base 18: mod_base = OTHER; note = 2'-O-methyluridine-3'-phosphorothioate
  modified_base 19: mod_base = OTHER; note 2'-fluoroadenosine-3'-phosphate-N,N'-((5S)-6-((6-hydroxy-5- (lambda-3-methyl)hexyl)amino)-6-oxohexane-1,5-diyl)ditetrad ecanamide
ccaggatgagaactaccta

SEQ ID NO: 1169 - RNA, 19 nt, synthetic construct
  source 1..19: mol_type = other RNA
  modified_base 1: mod_base = OTHER; note = 2'-fluorocytidine-3'-phosphorothioate
  modified_base 2: mod_base = OTHER; note = 2'-O-methyluridine-3'-phosphorothioate
  modified_base 3: mod_base = OTHER; note = 2'-fluoroadenosine-3'-phosphate
  modified_base 4: mod_base = OTHER; note = 2'-O-methylcytidine-3'-phosphate
  modified_base 5: mod_base = OTHER; note = 2'-fluoroguanosine-3'-phosphate
  modified_base 6: mod_base = OTHER; note = 2'-O-methyluridine-3'-phosphate
  modified_base 7: mod_base = OTHER; note = 2'-fluoroguanosine-3'-phosphate
  modified_base 8: mod_base = OTHER; note = 2'-O-methylcytidine-3'-phosphate
  modified_base 9: mod_base = OTHER; note = 2'-fluoroadenosine-3'-phosphate
  modified_base 10: mod_base = OTHER; note = 2'-O-methylcytidine-3'-phosphate
  modified_base 11: mod_base = OTHER; note = 2'-fluoroadenosine-3'-phosphate
  modified_base 12: mod_base = OTHER; note = 2'-O-methylguanosine-3'-phosphate
  modified_base 13: mod_base = OTHER; note = 2'-fluoroguanosine-3'-phosphate
  modified_base 14: mod_base = OTHER; note = 2'-O-methylguanosine-3'-phosphate
  modified_base 15: mod_base = OTHER; note = 2'-fluoroadenosine-3'-phosphate
  modified_base 16: mod_base = OTHER; note = 2'-O-methylcytidine-3'-phosphate
  modified_base 17: mod_base = OTHER; note = 2'-fluoroadenosine-3'-phosphorothioate
  modified_base 18: mod_base = OTHER; note = 2'-O-methyluridine-3'-phosphorothioate
  modified_base 19: mod_base = OTHER; note 2'-fluorouridine-3'-phosphate-N,N'-((5S)-6-((6-hydroxy-5-(l ambda-3-methyl)hexyl)amino)-6-oxohexane-1,5-diyl)ditetradec anamide
ctacgtgcacagggacatt

SEQ ID NO: 1170 - RNA, 19 nt, synthetic construct
  source 1..19: mol_type = other RNA
  modified_base 1: mod_base = OTHER; note = 2'-fluorouridine-3'-phosphorothioate
  modified_base 2: mod_base = OTHER; note = 2'-O-methylguanosine-3'-phosphorothioate
  modified_base 3: mod_base = OTHER; note = 2'-fluorocytidine-3'-phosphate
  modified_base 4: mod_base = OTHER; note = 2'-O-methyladenosine-3'-phosphate
  modified_base 5: mod_base = OTHER; note = 2'-fluorocytidine-3'-phosphate
  modified_base 6: mod_base = OTHER; note = 2'-O-methyladenosine-3'-phosphate
  modified_base 7: mod_base = OTHER; note = 2'-fluoroguanosine-3'-phosphate
  modified_base 8: mod_base = OTHER; note = 2'-O-methylguanosine-3'-phosphate
  modified_base 9: mod_base = OTHER; note = 2'-fluoroguanosine-3'-phosphate
  modified_base 10: mod_base = OTHER; note = 2'-O-methyladenosine-3'-phosphate
  modified_base 11: mod_base = OTHER; note = 2'-fluorocytidine-3'-phosphate
  modified_base 12: mod_base = OTHER; note = 2'-O-methyladenosine-3'-phosphate
  modified_base 13: mod_base = OTHER; note = 2'-fluorouridine-3'-phosphate
  modified_base 14: mod_base = OTHER; note = 2'-O-methylcytidine-3'-phosphate
  modified_base 15: mod_base = OTHER; note = 2'-fluoroadenosine-3'-phosphate
  modified_base 16: mod_base = OTHER; note = 2'-O-methyladenosine-3'-phosphate
  modified_base 17: mod_base = OTHER; note = 2'-fluoroadenosine-3'-phosphorothioate
  modified_base 18: mod_base = OTHER; note = 2'-O-methylcytidine-3'-phosphorothioate
  modified_base 19: mod_base = OTHER; note 2'-fluorouridine-3'-phosphate-N,N'-((5S)-6-((6-hydroxy-5-(l ambda-3-methyl)hexyl)amino)-6-oxohexane-1,5-diyl)ditetradec anamide
tgcacagggacatcaaact

SEQ ID NO: 1171 - RNA, 19 nt, synthetic construct
  source 1..19: mol_type = other RNA
  modified_base 1: mod_base = OTHER; note = 2'-fluorocytidine-3'-phosphorothioate
  modified_base 2: mod_base = OTHER; note = 2'-O-methyladenosine-3'-phosphorothioate
  modified_base 3: mod_base = OTHER; note = 2'-fluorocytidine-3'-phosphate
  modified_base 4: mod_base = OTHER; note = 2'-O-methylguanosine-3'-phosphate
  modified_base 5: mod_base = OTHER; note = 2'-fluoroguanosine-3'-phosphate
  modified_base 6: mod_base = OTHER; note = 2'-O-methyladenosine-3'-phosphate
  modified_base 7: mod_base = OTHER; note = 2'-fluorouridine-3'-phosphate
  modified_base 8: mod_base = OTHER; note = 2'-O-methylcytidine-3'-phosphate
  modified_base 9: mod_base = OTHER; note = 2'-fluorocytidine-3'-phosphate
  modified_base 10: mod_base = OTHER; note = 2'-O-methyladenosine-3'-phosphate
  modified_base 11: mod_base = OTHER; note = 2'-fluorocytidine-3'-phosphate
  modified_base 12: mod_base = OTHER; note = 2'-O-methylcytidine-3'-phosphate
  modified_base 13: mod_base = OTHER; note = 2'-fluorouridine-3'-phosphate
  modified_base 14: mod_base = OTHER; note = 2'-O-methyluridine-3'-phosphate
  modified_base 15: mod_base = OTHER; note = 2'-fluorocytidine-3'-phosphate
  modified_base 16: mod_base = OTHER; note = 2'-O-methylcytidine-3'-phosphate
  modified_base 17: mod_base = OTHER; note = 2'-fluorocytidine-3'-phosphorothioate
  modified_base 18: mod_base = OTHER; note = 2'-O-methyladenosine-3'-phosphorothioate
  modified_base 19: mod_base = OTHER; note 2'-fluorouridine-3'-phosphate-N,N'-((5S)-6-((6-hydroxy-5-(l ambda-3-methyl)hexyl)amino)-6-oxohexane-1,5-diyl)ditetradec anamide
cacggatccaccttcccat

SEQ ID NO: 1172 - RNA, 19 nt, synthetic construct
  source 1..19: mol_type = other RNA
  modified_base 1: mod_base = OTHER; note = 2'-fluoroadenosine-3'-phosphorothioate
  modified_base 2: mod_base = OTHER; note = 2'-O-methyluridine-3'-phosphorothioate
  modified_base 3: mod_base = OTHER; note = 2'-fluorouridine-3'-phosphate
  modified_base 4: mod_base = OTHER; note = 2'-O-methylcytidine-3'-phosphate
  modified_base 5: mod_base = OTHER; note = 2'-fluorocytidine-3'-phosphate
  modified_base 6: mod_base = OTHER; note = 2'-O-methyluridine-3'-phosphate
  modified_base 7: mod_base = OTHER; note = 2'-fluorocytidine-3'-phosphate
  modified_base 8: mod_base = OTHER; note = 2'-O-methylguanosine-3'-phosphate
  modified_base 9: mod_base = OTHER; note = 2'-fluoroguanosine-3'-phosphate
  modified_base 10: mod_base = OTHER; note = 2'-O-methyluridine-3'-phosphate
  modified_base 11: mod_base = OTHER; note = 2'-fluoroadenosine-3'-phosphate
  modified_base 12: mod_base = OTHER; note = 2'-O-methyluridine-3'-phosphate
  modified_base 13: mod_base = OTHER; note = 2'-fluorouridine-3'-phosphate
  modified_base 14: mod_base = OTHER; note = 2'-O-methyluridine-3'-phosphate
  modified_base 15: mod_base = OTHER; note = 2'-fluoroadenosine-3'-phosphate
  modified_base 16: mod_base = OTHER; note = 2'-O-methyluridine-3'-phosphate
  modified_base 17: mod_base = OTHER; note = 2'-fluorouridine-3'-phosphorothioate
  modified_base 18: mod_base = OTHER; note = 2'-O-methylguanosine-3'-phosphorothioate
  modified_base 19: mod_base = OTHER; note 2'-fluorouridine-3'-phosphate-N,N'-((5S)-6-((6-hydroxy-5-(l ambda-3-methyl)hexyl)amino)-6-oxohexane-1,5-diyl)ditetradec anamide
attcctcggtatttattgt

SEQ ID NO: 1173 - RNA, 19 nt, synthetic construct
  source 1..19: mol_type = other RNA
  modified_base 1: mod_base = OTHER; note = 2'-fluorocytidine-3'-phosphorothioate
  modified_base 2: mod_base = OTHER; note = 2'-O-methyluridine-3'-phosphorothioate
  modified_base 3: mod_base = OTHER; note = 2'-fluorocytidine-3'-phosphate
  modified_base 4: mod_base = OTHER; note = 2'-O-methylguanosine-3'-phosphate
  modified_base 5: mod_base = OTHER; note = 2'-fluoroguanosine-3'-phosphate
  modified_base 6: mod_base = OTHER; note = 2'-O-methyluridine-3'-phosphate
  modified_base 7: mod_base = OTHER; note = 2'-fluoroadenosine-3'-phosphate
  modified_base 8: mod_base = OTHER; note = 2'-O-methyluridine-3'-phosphate
  modified_base 9: mod_base = OTHER; note = 2'-fluorouridine-3'-phosphate
  modified_base 10: mod_base = OTHER; note = 2'-O-methyluridine-3'-phosphate
  modified_base 11: mod_base = OTHER; note = 2'-fluoroadenosine-3'-phosphate
  modified_base 12: mod_base = OTHER; note = 2'-O-methyluridine-3'-phosphate
  modified_base 13: mod_base = OTHER; note = 2'-fluorouridine-3'-phosphate
  modified_base 14: mod_base = OTHER; note = 2'-O-methylguanosine-3'-phosphate
  modified_base 15: mod_base = OTHER; note = 2'-fluorouridine-3'-phosphate
  modified_base 16: mod_base = OTHER; note = 2'-O-methylcytidine-3'-phosphate
  modified_base 17: mod_base = OTHER; note = 2'-fluorouridine-3'-phosphorothioate
  modified_base 18: mod_base = OTHER; note = 2'-O-methylguanosine-3'-phosphorothioate
  modified_base 19: mod_base = OTHER; note 2'-fluorouridine-3'-phosphate-N,N'-((5S)-6-((6-hydroxy-5-(l ambda-3-methyl)hexyl)amino)-6-oxohexane-1,5-diyl)ditetradec anamide
ctcggtatttattgtctgt

SEQ ID NO: 1174 - RNA, 19 nt, synthetic construct
  source 1..19: mol_type = other RNA
  modified_base 1: mod_base = OTHER; note = 2'-fluorouridine-3'-phosphorothioate
  modified_base 2: mod_base = OTHER; note = 2'-O-methylcytidine-3'-phosphorothioate
  modified_base 3: mod_base = OTHER; note = 2'-fluoroguanosine-3'-phosphate
  modified_base 4: mod_base = OTHER; note = 2'-O-methylguanosine-3'-phosphate
  modified_base 5: mod_base = OTHER; note = 2'-fluorouridine-3'-phosphate
  modified_base 6: mod_base = OTHER; note = 2'-O-methyladenosine-3'-phosphate
  modified_base 7: mod_base = OTHER; note = 2'-fluorouridine-3'-phosphate
  modified_base 8: mod_base = OTHER; note = 2'-O-methyluridine-3'-phosphate
  modified_base 9: mod_base = OTHER; note = 2'-fluorouridine-3'-phosphate
  modified_base 10: mod_base = OTHER; note = 2'-O-methyladenosine-3'-phosphate
  modified_base 11: mod_base = OTHER; note = 2'-fluorouridine-3'-phosphate
  modified_base 12: mod_base = OTHER; note = 2'-O-methyluridine-3'-phosphate
  modified_base 13: mod_base = OTHER; note = 2'-fluoroguanosine-3'-phosphate
  modified_base 14: mod_base = OTHER; note = 2'-O-methyluridine-3'-phosphate
  modified_base 15: mod_base = OTHER; note = 2'-fluorocytidine-3'-phosphate
  modified_base 16: mod_base = OTHER; note = 2'-O-methyluridine-3'-phosphate
  modified_base 17: mod_base = OTHER; note = 2'-fluoroguanosine-3'-phosphorothioate
  modified_base 18: mod_base = OTHER; note = 2'-O-methyluridine-3'-phosphorothioate
  modified_base 19: mod_base = OTHER; note 2'-fluorouridine-3'-phosphate-N,N'-((5S)-6-((6-hydroxy-5-(l ambda-3-methyl)hexyl)amino)-6-oxohexane-1,5-diyl)ditetradec anamide
tcggtatttattgtctgtt

SEQ ID NO: 1175 - RNA, 19 nt, synthetic construct
  source 1..19: mol_type = other RNA
  modified_base 1: mod_base = OTHER; note = 2'-fluorocytidine-3'-phosphorothioate
  modified_base 2: mod_base = OTHER; note = 2'-O-methylguanosine-3'-phosphorothioate
  modified_base 3: mod_base = OTHER; note = 2'-fluoroguanosine-3'-phosphate
  modified_base 4: mod_base = OTHER; note = 2'-O-methyluridine-3'-phosphate
  modified_base 5: mod_base = OTHER; note = 2'-fluoroadenosine-3'-phosphate
  modified_base 6: mod_base = OTHER; note = 2'-O-methyluridine-3'-phosphate
  modified_base 7: mod_base = OTHER; note = 2'-fluorouridine-3'-phosphate
  modified_base 8: mod_base = OTHER; note = 2'-O-methyluridine-3'-phosphate
  modified_base 9: mod_base = OTHER; note = 2'-fluoroadenosine-3'-phosphate
  modified_base 10: mod_base = OTHER; note = 2'-O-methyluridine-3'-phosphate
  modified_base 11: mod_base = OTHER; note = 2'-fluorouridine-3'-phosphate
  modified_base 12: mod_base = OTHER; note = 2'-O-methylguanosine-3'-phosphate
  modified_base 13: mod_base = OTHER; note = 2'-fluorouridine-3'-phosphate
  modified_base 14: mod_base = OTHER; note = 2'-O-methylcytidine-3'-phosphate
  modified_base 15: mod_base = OTHER; note = 2'-fluorouridine-3'-phosphate
  modified_base 16: mod_base = OTHER; note = 2'-O-methylguanosine-3'-phosphate
  modified_base 17: mod_base = OTHER; note = 2'-fluorouridine-3'-phosphorothioate
  modified_base 18: mod_base = OTHER; note = 2'-O-methylcytidine-3'-phosphorothioate
  modified_base 19: mod_base = OTHER; note 2'-fluorouridine-3'-phosphate-N,N'-((5S)-6-((6-hydroxy-5-(l ambda-3-methyl)hexyl)amino)-6-oxohexane-1,5-diyl)ditetradec anamide
cggtatttattgtctgtct

SEQ ID NO: 1176 - RNA, 19 nt, synthetic construct
  source 1..19: mol_type = other RNA
  modified_base 1: mod_base = OTHER; note = 2'-fluorocytidine-3'-phosphorothioate
  modified_base 2: mod_base = OTHER; note = 2'-O-methylcytidine-3'-phosphorothioate
  modified_base 3: mod_base = OTHER; note = 2'-fluoroadenosine-3'-phosphate
  modified_base 4: mod_base = OTHER; note = 2'-O-methyluridine-3'-phosphate
  modified_base 5: mod_base = OTHER; note = 2'-fluorocytidine-3'-phosphate
  modified_base 6: mod_base = OTHER; note = 2'-O-methylguanosine-3'-phosphate
  modified_base 7: mod_base = OTHER; note = 2'-fluorouridine-3'-phosphate
  modified_base 8: mod_base = OTHER; note = 2'-O-methylguanosine-3'-phosphate
  modified_base 9: mod_base = OTHER; note = 2'-fluoroguanosine-3'-phosphate
  modified_base 10: mod_base = OTHER; note = 2'-O-methyluridine-3'-phosphate
  modified_base 11: mod_base = OTHER; note = 2'-fluoroguanosine-3'-phosphate
  modified_base 12: mod_base = OTHER; note = 2'-O-methyladenosine-3'-phosphate
  modified_base 13: mod_base = OTHER; note = 2'-fluoroguanosine-3'-phosphate
  modified_base 14: mod_base = OTHER; note = 2'-O-methylguanosine-3'-phosphate
  modified_base 15: mod_base = OTHER; note = 2'-fluorocytidine-3'-phosphate
  modified_base 16: mod_base = OTHER; note = 2'-O-methyluridine-3'-phosphate
  modified_base 17: mod_base = OTHER; note = 2'-fluorouridine-3'-phosphorothioate
  modified_base 18: mod_base = OTHER; note = 2'-O-methyladenosine-3'-phosphorothioate
  modified_base 19: mod_base = OTHER; note 2'-fluoroadenosine-3'-phosphate-N,N'-((5S)-6-((6-hydroxy-5- (lambda-3-methyl)hexyl)amino)-6-oxohexane-1,5-diyl)ditetrad ecanamide
ccatcgtggtgaggcttaa

SEQ ID NO: 1177 - RNA, 19 nt, synthetic construct
  source 1..19: mol_type = other RNA
  modified_base 1: mod_base = OTHER; note = 2'-fluorocytidine-3'-phosphorothioate
  modified_base 2: mod_base = OTHER; note = 2'-O-methyladenosine-3'-phosphorothioate
  modified_base 3: mod_base = OTHER; note = 2'-fluorouridine-3'-phosphate
  modified_base 4: mod_base = OTHER; note = 2'-O-methylcytidine-3'-phosphate
  modified_base 5: mod_base = OTHER; note = 2'-fluoroguanosine-3'-phosphate
  modified_base 6: mod_base = OTHER; note = 2'-O-methyluridine-3'-phosphate
  modified_base 7: mod_base = OTHER; note = 2'-fluoroguanosine-3'-phosphate
  modified_base 8: mod_base = OTHER; note = 2'-O-methylguanosine-3'-phosphate
  modified_base 9: mod_base = OTHER; note = 2'-fluorouridine-3'-phosphate
  modified_base 10: mod_base = OTHER; note = 2'-O-methylguanosine-3'-phosphate
  modified_base 11: mod_base = OTHER; note = 2'-fluoroadenosine-3'-phosphate
  modified_base 12: mod_base = OTHER; note = 2'-O-methylguanosine-3'-phosphate
  modified_base 13: mod_base = OTHER; note = 2'-fluoroguanosine-3'-phosphate
  modified_base 14: mod_base = OTHER; note = 2'-O-methylcytidine-3'-phosphate
  modified_base 15: mod_base = OTHER; note = 2'-fluorouridine-3'-phosphate
  modified_base 16: mod_base = OTHER; note = 2'-O-methyluridine-3'-phosphate
  modified_base 17: mod_base = OTHER; note = 2'-fluoroadenosine-3'-phosphorothioate
  modified_base 18: mod_base = OTHER; note = 2'-O-methyladenosine-3'-phosphorothioate
  modified_base 19: mod_base = OTHER; note 2'-fluorouridine-3'-phosphate-N,N'-((5S)-6-((6-hydroxy-5-(l ambda-3-methyl)hexyl)amino)-6-oxohexane-1,5-diyl)ditetradec anamide
catcgtggtgaggcttaat

SEQ ID NO: 1178 - RNA, 19 nt, synthetic construct
  source 1..19: mol_type = other RNA
  modified_base 1: mod_base = OTHER; note = 2'-fluoroguanosine-3'-phosphorothioate
  modified_base 2: mod_base = OTHER; note = 2'-O-methylguanosine-3'-phosphorothioate
  modified_base 3: mod_base = OTHER; note = 2'-fluoroadenosine-3'-phosphate
  modified_base 4: mod_base = OTHER; note = 2'-O-methylcytidine-3'-phosphate
  modified_base 5: mod_base = OTHER; note = 2'-fluoroguanosine-3'-phosphate
  modified_base 6: mod_base = OTHER; note = 2'-O-methyladenosine-3'-phosphate
  modified_base 7: mod_base = OTHER; note = 2'-fluorocytidine-3'-phosphate
  modified_base 8: mod_base = OTHER; note = 2'-O-methyluridine-3'-phosphate
  modified_base 9: mod_base = OTHER; note = 2'-fluorouridine-3'-phosphate
  modified_base 10: mod_base = OTHER; note = 2'-O-methylcytidine-3'-phosphate
  modified_base 11: mod_base = OTHER; note = 2'-fluoroguanosine-3'-phosphate
  modified_base 12: mod_base = OTHER; note = 2'-O-methyladenosine-3'-phosphate
  modified_base 13: mod_base = OTHER; note = 2'-fluoroguanosine-3'-phosphate
  modified_base 14: mod_base = OTHER; note = 2'-O-methyladenosine-3'-phosphate
  modified_base 15: mod_base = OTHER; note = 2'-fluorouridine-3'-phosphate
  modified_base 16: mod_base = OTHER; note = 2'-O-methyluridine-3'-phosphate
  modified_base 17: mod_base = OTHER; note = 2'-fluorocytidine-3'-phosphorothioate
  modified_base 18: mod_base = OTHER; note = 2'-O-methyluridine-3'-phosphorothioate
  modified_base 19: mod_base = OTHER; note 2'-fluorouridine-3'-phosphate-N,N'-((5S)-6-((6-hydroxy-5-(l ambda-3-methyl)hexyl)amino)-6-oxohexane-1,5-diyl)ditetradec anamide
ggacgacttcgagattctt

SEQ ID NO: 1179 - RNA, 19 nt, synthetic construct
  source 1..19: mol_type = other RNA
  modified_base 1: mod_base = OTHER; note = 2'-fluoroadenosine-3'-phosphorothioate
  modified_base 2: mod_base = OTHER; note = 2'-O-methylguanosine-3'-phosphorothioate
  modified_base 3: mod_base = OTHER; note = 2'-fluorocytidine-3'-phosphate
  modified_base 4: mod_base = OTHER; note = 2'-O-methyladenosine-3'-phosphate
  modified_base 5: mod_base = OTHER; note = 2'-fluoroguanosine-3'-phosphate
  modified_base 6: mod_base = OTHER; note = 2'-O-methyladenosine-3'-phosphate
  modified_base 7: mod_base = OTHER; note = 2'-fluorocytidine-3'-phosphate
  modified_base 8: mod_base = OTHER; note = 2'-O-methylguanosine-3'-phosphate
  modified_base 9: mod_base = OTHER; note = 2'-fluoroguanosine-3'-phosphate
  modified_base 10: mod_base = OTHER; note = 2'-O-methylguanosine-3'-phosphate
  modified_base 11: mod_base = OTHER; note = 2'-fluorocytidine-3'-phosphate
  modified_base 12: mod_base = OTHER; note = 2'-O-methylcytidine-3'-phosphate
  modified_base 13: mod_base = OTHER; note = 2'-fluoroadenosine-3'-phosphate
  modified_base 14: mod_base = OTHER; note = 2'-O-methylguanosine-3'-phosphate
  modified_base 15: mod_base = OTHER; note = 2'-fluoroguanosine-3'-phosphate
  modified_base 16: mod_base = OTHER; note = 2'-O-methyluridine-3'-phosphate
  modified_base 17: mod_base = OTHER; note = 2'-fluoroguanosine-3'-phosphorothioate
  modified_base 18: mod_base = OTHER; note = 2'-O-methyluridine-3'-phosphorothioate
  modified_base 19: mod_base = OTHER; note 2'-fluoroadenosine-3'-phosphate-N,N'-((5S)-6-((6-hydroxy-5- (lambda-3-methyl)hexyl)amino)-6-oxohexane-1,5-diyl)ditetrad ecanamide
agcagacgggccaggtgta

SEQ ID NO: 1180 - RNA, 19 nt, synthetic construct
  source 1..19: mol_type = other RNA
  modified_base 1: mod_base = OTHER; note = 2'-fluorocytidine-3'-phosphorothioate
  modified_base 2: mod_base = OTHER; note = 2'-O-methyladenosine-3'-phosphorothioate
  modified_base 3: mod_base = OTHER; note = 2'-fluorouridine-3'-phosphate
  modified_base 4: mod_base = OTHER; note = 2'-O-methylguanosine-3'-phosphate
  modified_base 5: mod_base = OTHER; note = 2'-fluoroadenosine-3'-phosphate
  modified_base 6: mod_base = OTHER; note = 2'-O-methyladenosine-3'-phosphate
  modified_base 7: mod_base = OTHER; note = 2'-fluoroguanosine-3'-phosphate
  modified_base 8: mod_base = OTHER; note = 2'-O-methyladenosine-3'-phosphate
  modified_base 9: mod_base = OTHER; note = 2'-fluorouridine-3'-phosphate
  modified_base 10: mod_base = OTHER; note = 2'-O-methylcytidine-3'-phosphate
  modified_base 11: mod_base = OTHER; note = 2'-fluoroadenosine-3'-phosphate
  modified_base 12: mod_base = OTHER; note = 2'-O-methyluridine-3'-phosphate
  modified_base 13: mod_base = OTHER; note = 2'-fluoroguanosine-3'-phosphate
  modified_base 14: mod_base = OTHER; note = 2'-O-methyladenosine-3'-phosphate
  modified_base 15: mod_base = OTHER; note = 2'-fluoroadenosine-3'-phosphate
  modified_base 16: mod_base = OTHER; note = 2'-O-methylcytidine-3'-phosphate
  modified_base 17: mod_base = OTHER; note = 2'-fluoroadenosine-3'-phosphorothioate
  modified_base 18: mod_base = OTHER; note = 2'-O-methyladenosine-3'-phosphorothioate
  modified_base 19: mod_base = OTHER; note 2'-fluorouridine-3'-phosphate-N,N'-((5S)-6-((6-hydroxy-5-(l ambda-3-methyl)hexyl)amino)-6-oxohexane-1,5-diyl)ditetradec anamide
catgaagatcatgaacaat

SEQ ID NO: 1181 - RNA, 19 nt, synthetic construct
  source 1..19: mol_type = other RNA
  modified_base 1: mod_base = OTHER; note = 2'-fluorouridine-3'-phosphorothioate
  modified_base 2: mod_base = OTHER; note = 2'-O-methylguanosine-3'-phosphorothioate
  modified_base 3: mod_base = OTHER; note = 2'-fluoroadenosine-3'-phosphate
  modified_base 4: mod_base = OTHER; note = 2'-O-methyladenosine-3'-phosphate
  modified_base 5: mod_base = OTHER; note = 2'-fluoroguanosine-3'-phosphate
  modified_base 6: mod_base = OTHER; note = 2'-O-methyladenosine-3'-phosphate
  modified_base 7: mod_base = OTHER; note = 2'-fluorouridine-3'-phosphate
  modified_base 8: mod_base = OTHER; note = 2'-O-methylcytidine-3'-phosphate
  modified_base 9: mod_base = OTHER; note = 2'-fluoroadenosine-3'-phosphate
  modified_base 10: mod_base = OTHER; note = 2'-O-methyluridine-3'-phosphate
  modified_base 11: mod_base = OTHER; note = 2'-fluoroguanosine-3'-phosphate
  modified_base 12: mod_base = OTHER; note = 2'-O-methyladenosine-3'-phosphate
  modified_base 13: mod_base = OTHER; note = 2'-fluoroadenosine-3'-phosphate
  modified_base 14: mod_base = OTHER; note = 2'-O-methylcytidine-3'-phosphate
  modified_base 15: mod_base = OTHER; note = 2'-fluoroadenosine-3'-phosphate
  modified_base 16: mod_base = OTHER; note = 2'-O-methyladenosine-3'-phosphate
  modified_base 17: mod_base = OTHER; note = 2'-fluoroguanosine-3'-phosphorothioate
  modified_base 18: mod_base = OTHER; note = 2'-O-methyluridine-3'-phosphorothioate
  modified_base 19: mod_base = OTHER; note 2'-fluorouridine-3'-phosphate-N,N'-((5S)-6-((6-hydroxy-5-(l ambda-3-methyl)hexyl)amino)-6-oxohexane-1,5-diyl)ditetradec anamide
tgaagatcatgaacaagtt

SEQ ID NO: 1182 - RNA, 19 nt, synthetic construct
  source 1..19: mol_type = other RNA
  modified_base 1: mod_base = OTHER; note = 2'-fluoroguanosine-3'-phosphorothioate
  modified_base 2: mod_base = OTHER; note = 2'-O-methyladenosine-3'-phosphorothioate
  modified_base 3: mod_base = OTHER; note = 2'-fluoroguanosine-3'-phosphate
  modified_base 4: mod_base = OTHER; note = 2'-O-methylguanosine-3'-phosphate
  modified_base 5: mod_base = OTHER; note = 2'-fluorouridine-3'-phosphate
  modified_base 6: mod_base = OTHER; note = 2'-O-methylguanosine-3'-phosphate
  modified_base 7: mod_base = OTHER; note = 2'-fluorouridine-3'-phosphate
  modified_base 8: mod_base = OTHER; note = 2'-O-methylcytidine-3'-phosphate
  modified_base 9: mod_base = OTHER; note = 2'-fluoroguanosine-3'-phosphate
  modified_base 10: mod_base = OTHER; note = 2'-O-methyluridine-3'-phosphate
  modified_base 11: mod_base = OTHER; note = 2'-fluoroguanosine-3'-phosphate
  modified_base 12: mod_base = OTHER; note = 2'-O-methylcytidine-3'-phosphate
  modified_base 13: mod_base = OTHER; note = 2'-fluorouridine-3'-phosphate
  modified_base 14: mod_base = OTHER; note = 2'-O-methyluridine-3'-phosphate
  modified_base 15: mod_base = OTHER; note = 2'-fluorocytidine-3'-phosphate
  modified_base 16: mod_base = OTHER; note = 2'-O-methylcytidine-3'-phosphate
  modified_base 17: mod_base = OTHER; note = 2'-fluoroguanosine-3'-phosphorothioate
  modified_base 18: mod_base = OTHER; note = 2'-O-methyluridine-3'-phosphorothioate
  modified_base 19: mod_base = OTHER; note 2'-fluorouridine-3'-phosphate-N,N'-((5S)-6-((6-hydroxy-5-(l ambda-3-methyl)hexyl)amino)-6-oxohexane-1,5-diyl)ditetradec anamide
gaggtgtcgtgcttccgtt

SEQ ID NO: 1183 - RNA, 19 nt, synthetic construct
  source 1..19: mol_type = other RNA
  modified_base 1: mod_base = OTHER; note = 2'-fluoroguanosine-3'-phosphorothioate
  modified_base 2: mod_base = OTHER; note = 2'-O-methyladenosine-3'-phosphorothioate
  modified_base 3: mod_base = OTHER; note = 2'-fluoroguanosine-3'-phosphate
  modified_base 4: mod_base = OTHER; note = 2'-O-methylguanosine-3'-phosphate
  modified_base 5: mod_base = OTHER; note = 2'-fluoroguanosine-3'-phosphate
  modified_base 6: mod_base = OTHER; note = 2'-O-methyladenosine-3'-phosphate
  modified_base 7: mod_base = OTHER; note = 2'-fluorocytidine-3'-phosphate
  modified_base 8: mod_base = OTHER; note = 2'-O-methylguanosine-3'-phosphate
  modified_base 9: mod_base = OTHER; note = 2'-fluorouridine-3'-phosphate
  modified_base 10: mod_base = OTHER; note = 2'-O-methylguanosine-3'-phosphate
  modified_base 11: mod_base = OTHER; note = 2'-fluorouridine-3'-phosphate
  modified_base 12: mod_base = OTHER; note = 2'-O-methyluridine-3'-phosphate
  modified_base 13: mod_base = OTHER; note = 2'-fluoroguanosine-3'-phosphate
  modified_base 14: mod_base = OTHER; note = 2'-O-methylguanosine-3'-phosphate
  modified_base 15: mod_base = OTHER; note = 2'-fluorouridine-3'-phosphate
  modified_base 16: mod_base = OTHER; note = 2'-O-methylguanosine-3'-phosphate
  modified_base 17: mod_base = OTHER; note = 2'-fluoroadenosine-3'-phosphorothioate
  modified_base 18: mod_base = OTHER; note = 2'-O-methyladenosine-3'-phosphorothioate
  modified_base 19: mod_base = OTHER; note 2'-fluorouridine-3'-phosphate-N,N'-((5S)-6-((6-hydroxy-5-(l ambda-3-methyl)hexyl)amino)-6-oxohexane-1,5-diyl)ditetradec anamide
gagggacgtgttggtgaat

SEQ ID NO: 1184 - RNA, 19 nt, synthetic construct
  source 1..19: mol_type = other RNA
  modified_base 1: mod_base = OTHER; note = 2'-fluoroguanosine-3'-phosphorothioate
  modified_base 2: mod_base = OTHER; note = 2'-O-methylguanosine-3'-phosphorothioate
  modified_base 3: mod_base = OTHER; note = 2'-fluorouridine-3'-phosphate
  modified_base 4: mod_base = OTHER; note = 2'-O-methylcytidine-3'-phosphate
  modified_base 5: mod_base = OTHER; note = 2'-fluoroadenosine-3'-phosphate
  modified_base 6: mod_base = OTHER; note = 2'-O-methyluridine-3'-phosphate
  modified_base 7: mod_base = OTHER; note = 2'-fluoroguanosine-3'-phosphate
  modified_base 8: mod_base = OTHER; note = 2'-O-methylguanosine-3'-phosphate
  modified_base 9: mod_base = OTHER; note = 2'-fluoroadenosine-3'-phosphate
  modified_base 10: mod_base = OTHER; note = 2'-O-methylguanosine-3'-phosphate
  modified_base 11: mod_base = OTHER; note = 2'-fluorouridine-3'-phosphate
  modified_base 12: mod_base = OTHER; note = 2'-O-methyladenosine-3'-phosphate
  modified_base 13: mod_base = OTHER; note = 2'-fluorouridine-3'-phosphate
  modified_base 14: mod_base = OTHER; note = 2'-O-methyluridine-3'-phosphate
  modified_base 15: mod_base = OTHER; note = 2'-fluoroadenosine-3'-phosphate
  modified_base 16: mod_base = OTHER; note = 2'-O-methylcytidine-3'-phosphate
  modified_base 17: mod_base = OTHER; note = 2'-fluoroguanosine-3'-phosphorothioate
  modified_base 18: mod_base = OTHER; note = 2'-O-methyluridine-3'-phosphorothioate
  modified_base 19: mod_base = OTHER; note 2'-fluorouridine-3'-phosphate-N,N'-((5S)-6-((6-hydroxy-5-(l ambda-3-methyl)hexyl)amino)-6-oxohexane-1,5-diyl)ditetradec anamide
ggtcatggagtattacgtt

SEQ ID NO: 1185 - RNA, 19 nt, synthetic construct
  source 1..19: mol_type = other RNA
  modified_base 1: mod_base = OTHER; note = 2'-fluorouridine-3'-phosphorothioate
  modified_base 2: mod_base = OTHER; note = 2'-O-methyluridine-3'-phosphorothioate
  modified_base 3: mod_base = OTHER; note = 2'-fluorocytidine-3'-phosphate
  modified_base 4: mod_base = OTHER; note = 2'-O-methylguanosine-3'-phosphate
  modified_base 5: mod_base = OTHER; note = 2'-fluorocytidine-3'-phosphate
  modified_base 6: mod_base = OTHER; note = 2'-O-methylcytidine-3'-phosphate
  modified_base 7: mod_base = OTHER; note = 2'-fluorouridine-3'-phosphate
  modified_base 8: mod_base = OTHER; note = 2'-O-methyladenosine-3'-phosphate
  modified_base 9: mod_base = OTHER; note = 2'-fluorouridine-3'-phosphate
  modified_base 10: mod_base = OTHER; note = 2'-O-methylguanosine-3'-phosphate
  modified_base 11: mod_base = OTHER; note = 2'-fluoroadenosine-3'-phosphate
  modified_base 12: mod_base = OTHER; note = 2'-O-methyladenosine-3'-phosphate
  modified_base 13: mod_base = OTHER; note = 2'-fluoroadenosine-3'-phosphate
  modified_base 14: mod_base = OTHER; note = 2'-O-methyluridine-3'-phosphate
  modified_base 15: mod_base = OTHER; note = 2'-fluoroguanosine-3'-phosphate
  modified_base 16: mod_base = OTHER; note = 2'-O-methyluridine-3'-phosphate
  modified_base 17: mod_base = OTHER; note = 2'-fluorouridine-3'-phosphorothioate
  modified_base 18: mod_base = OTHER; note = 2'-O-methylcytidine-3'-phosphorothioate
  modified_base 19: mod_base = OTHER; note 2'-fluorouridine-3'-phosphate-N,N'-((5S)-6-((6-hydroxy-5-(l ambda-3-methyl)hexyl)amino)-6-oxohexane-1,5-diyl)ditetradec anamide
ttcgcctatgaaatgttct

SEQ ID NO: 1186 - RNA, 19 nt, synthetic construct
  source 1..19: mol_type = other RNA
  modified_base 1: mod_base = OTHER; note = 2'-fluorouridine-3'-phosphorothioate
  modified_base 2: mod_base = OTHER; note = 2'-O-methylcytidine-3'-phosphorothioate
  modified_base 3: mod_base = OTHER; note = 2'-fluoroguanosine-3'-phosphate
  modified_base 4: mod_base = OTHER; note = 2'-O-methylcytidine-3'-phosphate
  modified_base 5: mod_base = OTHER; note = 2'-fluorocytidine-3'-phosphate
  modified_base 6: mod_base = OTHER; note = 2'-O-methyluridine-3'-phosphate
  modified_base 7: mod_base = OTHER; note = 2'-fluoroadenosine-3'-phosphate
  modified_base 8: mod_base = OTHER; note = 2'-O-methyluridine-3'-phosphate
  modified_base 9: mod_base = OTHER; note = 2'-fluoroguanosine-3'-phosphate
  modified_base 10: mod_base = OTHER; note = 2'-O-methyladenosine-3'-phosphate
  modified_base 11: mod_base = OTHER; note = 2'-fluoroadenosine-3'-phosphate
  modified_base 12: mod_base = OTHER; note = 2'-O-methyladenosine-3'-phosphate
  modified_base 13: mod_base = OTHER; note = 2'-fluorouridine-3'-phosphate
  modified_base 14: mod_base = OTHER; note = 2'-O-methylguanosine-3'-phosphate
  modified_base 15: mod_base = OTHER; note = 2'-fluorouridine-3'-phosphate
  modified_base 16: mod_base = OTHER; note = 2'-O-methyluridine-3'-phosphate
  modified_base 17: mod_base = OTHER; note = 2'-fluorocytidine-3'-phosphorothioate
  modified_base 18: mod_base = OTHER; note = 2'-O-methyluridine-3'-phosphorothioate
  modified_base 19: mod_base = OTHER; note 2'-fluoroadenosine-3'-phosphate-N,N'-((5S)-6-((6-hydroxy-5- (lambda-3-methyl)hexyl)amino)-6-oxohexane-1,5-diyl)ditetrad ecanamide
tcgcctatgaaatgttcta

SEQ ID NO: 1187 - RNA, 19 nt, synthetic construct
  source 1..19: mol_type = other RNA
  modified_base 1: mod_base = OTHER; note = 2'-fluoroguanosine-3'-phosphorothioate
  modified_base 2: mod_base = OTHER; note = 2'-O-methylguanosine-3'-phosphorothioate
  modified_base 3: mod_base = OTHER; note = 2'-fluoroguanosine-3'-phosphate
  modified_base 4: mod_base = OTHER; note = 2'-O-methylcytidine-3'-phosphate
  modified_base 5: mod_base = OTHER; note = 2'-fluoroadenosine-3'-phosphate
  modified_base 6: mod_base = OTHER; note = 2'-O-methylguanosine-3'-phosphate
  modified_base 7: mod_base = OTHER; note = 2'-fluoroadenosine-3'-phosphate
  modified_base 8: mod_base = OTHER; note = 2'-O-methylcytidine-3'-phosphate
  modified_base 9: mod_base = OTHER; note = 2'-fluoroguanosine-3'-phosphate
  modified_base 10: mod_base = OTHER; note = 2'-O-methylcytidine-3'-phosphate
  modified_base 11: mod_base = OTHER; note = 2'-fluorocytidine-3'-phosphate
  modified_base 12: mod_base = OTHER; note = 2'-O-methylcytidine-3'-phosphate
  modified_base 13: mod_base = OTHER; note = 2'-fluorouridine-3'-phosphate
  modified_base 14: mod_base = OTHER; note = 2'-O-methyluridine-3'-phosphate
  modified_base 15: mod_base = OTHER; note = 2'-fluorocytidine-3'-phosphate
  modified_base 16: mod_base = OTHER; note = 2'-O-methyluridine-3'-phosphate
  modified_base 17: mod_base = OTHER; note = 2'-fluoroadenosine-3'-phosphorothioate
  modified_base 18: mod_base = OTHER; note = 2'-O-methylcytidine-3'-phosphorothioate
  modified_base 19: mod_base = OTHER; note 2'-fluorouridine-3'-phosphate-N,N'-((5S)-6-((6-hydroxy-5-(l ambda-3-methyl)hexyl)amino)-6-oxohexane-1,5-diyl)ditetradec anamide
gggcagacgcccttctact

SEQ ID NO: 1188 - RNA, 19 nt, synthetic construct
  source 1..19: mol_type = other RNA
  modified_base 1: mod_base = OTHER; note = 2'-fluorocytidine-3'-phosphorothioate
  modified_base 2: mod_base = OTHER; note = 2'-O-methylguanosine-3'-phosphorothioate
  modified_base 3: mod_base = OTHER; note = 2'-fluorocytidine-3'-phosphate
  modified_base 4: mod_base = OTHER; note = 2'-O-methylcytidine-3'-phosphate
  modified_base 5: mod_base = OTHER; note = 2'-fluorocytidine-3'-phosphate
  modified_base 6: mod_base = OTHER; note = 2'-O-methyluridine-3'-phosphate
  modified_base 7: mod_base = OTHER; note = 2'-fluorouridine-3'-phosphate
  modified_base 8: mod_base = OTHER; note = 2'-O-methylcytidine-3'-phosphate
  modified_base 9: mod_base = OTHER; note = 2'-fluorouridine-3'-phosphate
  modified_base 10: mod_base = OTHER; note = 2'-O-methyladenosine-3'-phosphate
  modified_base 11: mod_base = OTHER; note = 2'-fluorocytidine-3'-phosphate
  modified_base 12: mod_base = OTHER; note = 2'-O-methylguanosine-3'-phosphate
  modified_base 13: mod_base = OTHER; note = 2'-fluorocytidine-3'-phosphate
  modified_base 14: mod_base = OTHER; note = 2'-O-methylguanosine-3'-phosphate
  modified_base 15: mod_base = OTHER; note = 2'-fluoroguanosine-3'-phosphate
  modified_base 16: mod_base = OTHER; note = 2'-O-methyladenosine-3'-phosphate
  modified_base 17: mod_base = OTHER; note = 2'-fluorouridine-3'-phosphorothioate
  modified_base 18: mod_base = OTHER; note = 2'-O-methyluridine-3'-phosphorothioate
  modified_base 19: mod_base = OTHER; note 2'-fluorouridine-3'-phosphate-N,N'-((5S)-6-((6-hydroxy-5-(l ambda-3-methyl)hexyl)amino)-6-oxohexane-1,5-diyl)ditetradec anamide
cgcccttctacgcggattt

SEQ ID NO: 1189 - RNA, 19 nt, synthetic construct
  source 1..19: mol_type = other RNA
  modified_base 1: mod_base = OTHER; note = 2'-fluorocytidine-3'-phosphorothioate
  modified_base 2: mod_base = OTHER; note = 2'-O-methylcytidine-3'-phosphorothioate
  modified_base 3: mod_base = OTHER; note = 2'-fluorouridine-3'-phosphate
  modified_base 4: mod_base = OTHER; note = 2'-O-methyluridine-3'-phosphate
  modified_base 5: mod_base = OTHER; note = 2'-fluorocytidine-3'-phosphate
  modified_base 6: mod_base = OTHER; note = 2'-O-methyluridine-3'-phosphate
  modified_base 7: mod_base = OTHER; note = 2'-fluoroadenosine-3'-phosphate
  modified_base 8: mod_base = OTHER; note = 2'-O-methylcytidine-3'-phosphate
  modified_base 9: mod_base = OTHER; note = 2'-fluoroguanosine-3'-phosphate
  modified_base 10: mod_base = OTHER; note = 2'-O-methylcytidine-3'-phosphate
  modified_base 11: mod_base = OTHER; note = 2'-fluoroguanosine-3'-phosphate
  modified_base 12: mod_base = OTHER; note = 2'-O-methylguanosine-3'-phosphate
  modified_base 13: mod_base = OTHER; note = 2'-fluoroadenosine-3'-phosphate
  modified_base 14: mod_base = OTHER; note = 2'-O-methyluridine-3'-phosphate
  modified_base 15: mod_base = OTHER; note = 2'-fluorouridine-3'-phosphate
  modified_base 16: mod_base = OTHER; note = 2'-O-methylcytidine-3'-phosphate
  modified_base 17: mod_base = OTHER; note = 2'-fluorocytidine-3'-phosphorothioate
  modified_base 18: mod_base = OTHER; note = 2'-O-methyladenosine-3'-phosphorothioate
  modified_base 19: mod_base = OTHER; note 2'-fluorouridine-3'-phosphate-N,N'-((5S)-6-((6-hydroxy-5-(l ambda-3-methyl)hexyl)amino)-6-oxohexane-1,5-diyl)ditetradec anamide
ccttctacgcggattccat

SEQ ID NO: 1190 - RNA, 19 nt, synthetic construct
  source 1..19: mol_type = other RNA
  modified_base 1: mod_base = OTHER; note = 2'-fluorocytidine-3'-phosphorothioate
  modified_base 2: mod_base = OTHER; note = 2'-O-methyladenosine-3'-phosphorothioate
  modified_base 3: mod_base = OTHER; note = 2'-fluoroadenosine-3'-phosphate
  modified_base 4: mod_base = OTHER; note = 2'-O-methylguanosine-3'-phosphate
  modified_base 5: mod_base = OTHER; note = 2'-fluoroadenosine-3'-phosphate
  modified_base 6: mod_base = OTHER; note = 2'-O-methyluridine-3'-phosphate
  modified_base 7: mod_base = OTHER; note = 2'-fluorocytidine-3'-phosphate
  modified_base 8: mod_base = OTHER; note = 2'-O-methylguanosine-3'-phosphate
  modified_base 9: mod_base = OTHER; note = 2'-fluorouridine-3'-phosphate
  modified_base 10: mod_base = OTHER; note = 2'-O-methylcytidine-3'-phosphate
  modified_base 11: mod_base = OTHER; note = 2'-fluorocytidine-3'-phosphate
  modified_base 12: mod_base = OTHER; note = 2'-O-methyladenosine-3'-phosphate
  modified_base 13: mod_base = OTHER; note = 2'-fluorocytidine-3'-phosphate
  modified_base 14: mod_base = OTHER; note = 2'-O-methyluridine-3'-phosphate
  modified_base 15: mod_base = OTHER; note = 2'-fluoroadenosine-3'-phosphate
  modified_base 16: mod_base = OTHER; note = 2'-O-methylcytidine-3'-phosphate
  modified_base 17: mod_base = OTHER; note = 2'-fluoroadenosine-3'-phosphorothioate
  modified_base 18: mod_base = OTHER; note = 2'-O-methyladenosine-3'-phosphorothioate
  modified_base 19: mod_base = OTHER; note 2'-fluoroguanosine-3'-phosphate-N,N'-((5S)-6-((6-hydroxy-5- (lambda-3-methyl)hexyl)amino)-6-oxohexane-1,5-diyl)ditetrad ecanamide
caagatcgtccactacaag

SEQ ID NO: 1191 - RNA, 19 nt, synthetic construct
  source 1..19: mol_type = other RNA
  modified_base 1: mod_base = OTHER; note = 2'-fluorocytidine-3'-phosphorothioate
  modified_base 2: mod_base = OTHER; note = 2'-O-methyluridine-3'-phosphorothioate
  modified_base 3: mod_base = OTHER; note = 2'-fluoroadenosine-3'-phosphate
  modified_base 4: mod_base = OTHER; note = 2'-O-methylcytidine-3'-phosphate
  modified_base 5: mod_base = OTHER; note = 2'-fluoroadenosine-3'-phosphate
  modified_base 6: mod_base = OTHER; note = 2'-O-methyladenosine-3'-phosphate
  modified_base 7: mod_base = OTHER; note = 2'-fluoroguanosine-3'-phosphate
  modified_base 8: mod_base = OTHER; note = 2'-O-methylguanosine-3'-phosphate
  modified_base 9: mod_base = OTHER; note = 2'-fluoroadenosine-3'-phosphate
  modified_base 10: mod_base = OTHER; note = 2'-O-methylguanosine-3'-phosphate
  modified_base 11: mod_base = OTHER; note = 2'-fluorocytidine-3'-phosphate
  modified_base 12: mod_base = OTHER; note = 2'-O-methyladenosine-3'-phosphate
  modified_base 13: mod_base = OTHER; note = 2'-fluorocytidine-3'-phosphate
  modified_base 14: mod_base = OTHER; note = 2'-O-methylcytidine-3'-phosphate
  modified_base 15: mod_base = OTHER; note = 2'-fluorouridine-3'-phosphate
  modified_base 16: mod_base = OTHER; note = 2'-O-methylcytidine-3'-phosphate
  modified_base 17: mod_base = OTHER; note = 2'-fluorouridine-3'-phosphorothioate
  modified_base 18: mod_base = OTHER; note = 2'-O-methylcytidine-3'-phosphorothioate
  modified_base 19: mod_base = OTHER; note 2'-fluorouridine-3'-phosphate-N,N'-((5S)-6-((6-hydroxy-5-(l ambda-3-methyl)hexyl)amino)-6-oxohexane-1,5-diyl)ditetradec anamide
ctacaaggagcacctctct

SEQ ID NO: 1192 - RNA, 19 nt, synthetic construct
  source 1..19: mol_type = other RNA
  modified_base 1: mod_base = OTHER; note = 2'-fluorocytidine-3'-phosphorothioate
  modified_base 2: mod_base = OTHER; note = 2'-O-methyladenosine-3'-phosphorothioate
  modified_base 3: mod_base = OTHER; note = 2'-fluoroadenosine-3'-phosphate
  modified_base 4: mod_base = OTHER; note = 2'-O-methylguanosine-3'-phosphate
  modified_base 5: mod_base = OTHER; note = 2'-fluoroguanosine-3'-phosphate
  modified_base 6: mod_base = OTHER; note = 2'-O-methyladenosine-3'-phosphate
  modified_base 7: mod_base = OTHER; note = 2'-fluoroguanosine-3'-phosphate
  modified_base 8: mod_base = OTHER; note = 2'-O-methylcytidine-3'-phosphate
  modified_base 9: mod_base = OTHER; note = 2'-fluoroadenosine-3'-phosphate
  modified_base 10: mod_base = OTHER; note = 2'-O-methylcytidine-3'-phosphate
  modified_base 11: mod_base = OTHER; note = 2'-fluorocytidine-3'-phosphate
  modified_base 12: mod_base = OTHER; note = 2'-O-methyluridine-3'-phosphate
  modified_base 13: mod_base = OTHER; note = 2'-fluorocytidine-3'-phosphate
  modified_base 14: mod_base = OTHER; note = 2'-O-methyluridine-3'-phosphate
  modified_base 15: mod_base = OTHER; note = 2'-fluorocytidine-3'-phosphate
  modified_base 16: mod_base = OTHER; note = 2'-O-methyluridine-3'-phosphate
  modified_base 17: mod_base = OTHER; note = 2'-fluorocytidine-3'-phosphorothioate
  modified_base 18: mod_base = OTHER; note = 2'-O-methyluridine-3'-phosphorothioate
  modified_base 19: mod_base = OTHER; note 2'-fluorouridine-3'-phosphate-N,N'-((5S)-6-((6-hydroxy-5-(l ambda-3-methyl)hexyl)amino)-6-oxohexane-1,5-diyl)ditetradec anamide
caaggagcacctctctctt

SEQ ID NO: 1193 - RNA, 19 nt, synthetic construct
  source 1..19: mol_type = other RNA
  modified_base 1: mod_base = OTHER; note = 2'-fluorocytidine-3'-phosphorothioate
  modified_base 2: mod_base = OTHER; note = 2'-O-methyluridine-3'-phosphorothioate
  modified_base 3: mod_base = OTHER; note = 2'-fluorouridine-3'-phosphate
  modified_base 4: mod_base = OTHER; note = 2'-O-methylcytidine-3'-phosphate
  modified_base 5: mod_base = OTHER; note = 2'-fluorouridine-3'-phosphate
  modified_base 6: mod_base = OTHER; note = 2'-O-methyluridine-3'-phosphate
  modified_base 7: mod_base = OTHER; note = 2'-fluorocytidine-3'-phosphate
  modified_base 8: mod_base = OTHER; note = 2'-O-methyluridine-3'-phosphate
  modified_base 9: mod_base = OTHER; note = 2'-fluorouridine-3'-phosphate
  modified_base 10: mod_base = OTHER; note = 2'-O-methyluridine-3'-phosphate
  modified_base 11: mod_base = OTHER; note = 2'-fluoroguanosine-3'-phosphate
  modified_base 12: mod_base = OTHER; note = 2'-O-methylguanosine-3'-phosphate
  modified_base 13: mod_base = OTHER; note = 2'-fluorocytidine-3'-phosphate
  modified_base 14: mod_base = OTHER; note = 2'-O-methylcytidine-3'-phosphate
  modified_base 15: mod_base = OTHER; note = 2'-fluorouridine-3'-phosphate
  modified_base 16: mod_base = OTHER; note = 2'-O-methylcytidine-3'-phosphate
  modified_base 17: mod_base = OTHER; note = 2'-fluoroguanosine-3'-phosphorothioate
  modified_base 18: mod_base = OTHER; note = 2'-O-methyladenosine-3'-phosphorothioate
  modified_base 19: mod_base = OTHER; note 2'-fluorouridine-3'-phosphate-N,N'-((5S)-6-((6-hydroxy-5-(l ambda-3-methyl)hexyl)amino)-6-oxohexane-1,5-diyl)ditetradec anamide
cttcttctttggcctcgat

SEQ ID NO: 1194 - RNA, 19 nt, synthetic construct
  source 1..19: mol_type = other RNA
  modified_base 1: mod_base = OTHER; note = 2'-fluorouridine-3'-phosphorothioate
  modified_base 2: mod_base = OTHER; note = 2'-O-methylcytidine-3'-phosphorothioate
  modified_base 3: mod_base = OTHER; note = 2'-fluoroguanosine-3'-phosphate
  modified_base 4: mod_base = OTHER; note = 2'-O-methyladenosine-3'-phosphate
  modified_base 5: mod_base = OTHER; note = 2'-fluoroadenosine-3'-phosphate
  modified_base 6: mod_base = OTHER; note = 2'-O-methylguanosine-3'-phosphate
  modified_base 7: mod_base = OTHER; note = 2'-fluoroguanosine-3'-phosphate
  modified_base 8: mod_base = OTHER; note = 2'-O-methyluridine-3'-phosphate
  modified_base 9: mod_base = OTHER; note = 2'-fluoroguanosine-3'-phosphate
  modified_base 10: mod_base = OTHER; note = 2'-O-methylcytidine-3'-phosphate
  modified_base 11: mod_base = OTHER; note = 2'-fluorocytidine-3'-phosphate
  modified_base 12: mod_base = OTHER; note = 2'-O-methyladenosine-3'-phosphate
  modified_base 13: mod_base = OTHER; note = 2'-fluorocytidine-3'-phosphate
  modified_base 14: mod_base = OTHER; note = 2'-O-methylcytidine-3'-phosphate
  modified_base 15: mod_base = OTHER; note = 2'-fluoroguanosine-3'-phosphate
  modified_base 16: mod_base = OTHER; note = 2'-O-methyladenosine-3'-phosphate
  modified_base 17: mod_base = OTHER; note = 2'-fluorocytidine-3'-phosphorothioate
  modified_base 18: mod_base = OTHER; note = 2'-O-methyladenosine-3'-phosphorothioate
  modified_base 19: mod_base = OTHER; note 2'-fluorouridine-3'-phosphate-N,N'-((5S)-6-((6-hydroxy-5-(l ambda-3-methyl)hexyl)amino)-6-oxohexane-1,5-diyl)ditetradec anamide
tcgaaggtgccaccgacat

SEQ ID NO: 1195 - RNA, 19 nt, synthetic construct
  source 1..19: mol_type = other RNA
  modified_base 1: mod_base = OTHER; note = 2'-fluoroadenosine-3'-phosphorothioate
  modified_base 2: mod_base = OTHER; note = 2'-O-methylcytidine-3'-phosphorothioate
  modified_base 3: mod_base = OTHER; note = 2'-fluoroadenosine-3'-phosphate
  modified_base 4: mod_base = OTHER; note = 2'-O-methylcytidine-3'-phosphate
  modified_base 5: mod_base = OTHER; note = 2'-fluoroadenosine-3'-phosphate
  modified_base 6: mod_base = OTHER; note = 2'-O-methyluridine-3'-phosphate
  modified_base 7: mod_base = OTHER; note = 2'-fluoroguanosine-3'-phosphate
  modified_base 8: mod_base = OTHER; note = 2'-O-methylcytidine-3'-phosphate
  modified_base 9: mod_base = OTHER; note = 2'-fluoroadenosine-3'-phosphate
  modified_base 10: mod_base = OTHER; note = 2'-O-methyladenosine-3'-phosphate
  modified_base 11: mod_base = OTHER; note = 2'-fluorocytidine-3'-phosphate
  modified_base 12: mod_base = OTHER; note = 2'-O-methyluridine-3'-phosphate
  modified_base 13: mod_base = OTHER; note = 2'-fluorouridine-3'-phosphate
  modified_base 14: mod_base = OTHER; note = 2'-O-methylcytidine-3'-phosphate
  modified_base 15: mod_base = OTHER; note = 2'-fluoroguanosine-3'-phosphate
  modified_base 16: mod_base = OTHER; note = 2'-O-methyladenosine-3'-phosphate
  modified_base 17: mod_base = OTHER; note = 2'-fluorocytidine-3'-phosphorothioate
  modified_base 18: mod_base = OTHER; note = 2'-O-methyluridine-3'-phosphorothioate
  modified_base 19: mod_base = OTHER; note 2'-fluorouridine-3'-phosphate-N,N'-((5S)-6-((6-hydroxy-5-(l ambda-3-methyl)hexyl)amino)-6-oxohexane-1,5-diyl)ditetradec anamide
acacatgcaacttcgactt

SEQ ID NO: 1196 - RNA, 19 nt, synthetic construct
  source 1..19: mol_type = other RNA
  modified_base 1: mod_base = OTHER; note = 2'-fluorocytidine-3'-phosphorothioate
  modified_base 2: mod_base = OTHER; note = 2'-O-methyladenosine-3'-phosphorothioate
  modified_base 3: mod_base = OTHER; note = 2'-fluoroadenosine-3'-phosphate
  modified_base 4: mod_base = OTHER; note = 2'-O-methylcytidine-3'-phosphate
  modified_base 5: mod_base = OTHER; note = 2'-fluorouridine-3'-phosphate
  modified_base 6: mod_base = OTHER; note = 2'-O-methyluridine-3'-phosphate
  modified_base 7: mod_base = OTHER; note = 2'-fluorocytidine-3'-phosphate
  modified_base 8: mod_base = OTHER; note = 2'-O-methylguanosine-3'-phosphate
  modified_base 9: mod_base = OTHER; note = 2'-fluoroadenosine-3'-phosphate
  modified_base 10: mod_base = OTHER; note = 2'-O-methylcytidine-3'-phosphate
  modified_base 11: mod_base = OTHER; note = 2'-fluorouridine-3'-phosphate
  modified_base 12: mod_base = OTHER; note = 2'-O-methyluridine-3'-phosphate
  modified_base 13: mod_base = OTHER; note = 2'-fluoroguanosine-3'-phosphate
  modified_base 14: mod_base = OTHER; note = 2'-O-methylguanosine-3'-phosphate
  modified_base 15: mod_base = OTHER; note = 2'-fluorouridine-3'-phosphate
  modified_base 16: mod_base = OTHER; note = 2'-O-methylguanosine-3'-phosphate
  modified_base 17: mod_base = OTHER; note = 2'-fluoroguanosine-3'-phosphorothioate
  modified_base 18: mod_base = OTHER; note = 2'-O-methyladenosine-3'-phosphorothioate
  modified_base 19: mod_base = OTHER; note 2'-fluorouridine-3'-phosphate-N,N'-((5S)-6-((6-hydroxy-5-(l ambda-3-methyl)hexyl)amino)-6-oxohexane-1,5-diyl)ditetradec anamide
caacttcgacttggtggat

SEQ ID NO: 1197 - RNA, 19 nt, synthetic construct
  source 1..19: mol_type = other RNA
  modified_base 1: mod_base = OTHER; note = 2'-fluoroguanosine-3'-phosphorothioate
  modified_base 2: mod_base = OTHER; note = 2'-O-methylcytidine-3'-phosphorothioate
  modified_base 3: mod_base = OTHER; note = 2'-fluoroadenosine-3'-phosphate
  modified_base 4: mod_base = OTHER; note = 2'-O-methylguanosine-3'-phosphate
  modified_base 5: mod_base = OTHER; note = 2'-fluorouridine-3'-phosphate
  modified_base 6: mod_base = OTHER; note = 2'-O-methyluridine-3'-phosphate
  modified_base 7: mod_base = OTHER; note = 2'-fluoroguanosine-3'-phosphate
  modified_base 8: mod_base = OTHER; note = 2'-O-methylcytidine-3'-phosphate
  modified_base 9: mod_base = OTHER; note = 2'-fluoroadenosine-3'-phosphate
  modified_base 10: mod_base = OTHER; note = 2'-O-methylguanosine-3'-phosphate
  modified_base 11: mod_base = OTHER; note = 2'-fluoroguanosine-3'-phosphate
  modified_base 12: mod_base = OTHER; note = 2'-O-methyladenosine-3'-phosphate
  modified_base 13: mod_base = OTHER; note = 2'-fluoroguanosine-3'-phosphate
  modified_base 14: mod_base = OTHER; note = 2'-O-methylcytidine-3'-phosphate
  modified_base 15: mod_base = OTHER; note = 2'-fluoroguanosine-3'-phosphate
  modified_base 16: mod_base = OTHER; note = 2'-O-methylguanosine-3'-phosphate
  modified_base 17: mod_base = OTHER; note = 2'-fluoroadenosine-3'-phosphorothioate
  modified_base 18: mod_base = OTHER; note = 2'-O-methyluridine-3'-phosphorothioate
  modified_base 19: mod_base = OTHER; note 2'-fluorouridine-3'-phosphate-N,N'-((5S)-6-((6-hydroxy-5-(l ambda-3-methyl)hexyl)amino)-6-oxohexane-1,5-diyl)ditetradec anamide
gcagttgcaggagcggatt

SEQ ID NO: 1198 - RNA, 19 nt, synthetic construct
  source 1..19: mol_type = other RNA
  modified_base 1: mod_base = OTHER; note = 2'-fluorouridine-3'-phosphorothioate
  modified_base 2: mod_base = OTHER; note = 2'-O-methylguanosine-3'-phosphorothioate
  modified_base 3: mod_base = OTHER; note = 2'-fluorocytidine-3'-phosphate
  modified_base 4: mod_base = OTHER; note = 2'-O-methyladenosine-3'-phosphate
  modified_base 5: mod_base = OTHER; note = 2'-fluoroguanosine-3'-phosphate
  modified_base 6: mod_base = OTHER; note = 2'-O-methylguanosine-3'-phosphate
  modified_base 7: mod_base = OTHER; note = 2'-fluoroadenosine-3'-phosphate
  modified_base 8: mod_base = OTHER; note = 2'-O-methylguanosine-3'-phosphate
  modified_base 9: mod_base = OTHER; note = 2'-fluorocytidine-3'-phosphate
  modified_base 10: mod_base = OTHER; note = 2'-O-methylguanosine-3'-phosphate
  modified_base 11: mod_base = OTHER; note = 2'-fluoroguanosine-3'-phosphate
  modified_base 12: mod_base = OTHER; note = 2'-O-methyladenosine-3'-phosphate
  modified_base 13: mod_base = OTHER; note = 2'-fluorouridine-3'-phosphate
  modified_base 14: mod_base = OTHER; note = 2'-O-methylguanosine-3'-phosphate
  modified_base 15: mod_base = OTHER; note = 2'-fluoroguanosine-3'-phosphate
  modified_base 16: mod_base = OTHER; note = 2'-O-methyladenosine-3'-phosphate
  modified_base 17: mod_base = OTHER; note = 2'-fluoroguanosine-3'-phosphorothioate
  modified_base 18: mod_base = OTHER; note = 2'-O-methyluridine-3'-phosphorothioate
  modified_base 19: mod_base = OTHER; note 2'-fluorouridine-3'-phosphate-N,N'-((5S)-6-((6-hydroxy-5-(l ambda-3-methyl)hexyl)amino)-6-oxohexane-1,5-diyl)ditetradec anamide
tgcaggagcggatggagtt

SEQ ID NO: 1199 - RNA, 19 nt, synthetic construct
  source 1..19: mol_type = other RNA
  modified_base 1: mod_base = OTHER; note = 2'-fluoroguanosine-3'-phosphorothioate
  modified_base 2: mod_base = OTHER; note = 2'-O-methylcytidine-3'-phosphorothioate
  modified_base 3: mod_base = OTHER; note = 2'-fluorocytidine-3'-phosphate
  modified_base 4: mod_base = OTHER; note = 2'-O-methyluridine-3'-phosphate
  modified_base 5: mod_base = OTHER; note = 2'-fluoroadenosine-3'-phosphate
  modified_base 6: mod_base = OTHER; note = 2'-O-methyluridine-3'-phosphate
  modified_base 7: mod_base = OTHER; note = 2'-fluorocytidine-3'-phosphate
  modified_base 8: mod_base = OTHER; note = 2'-O-methylguanosine-3'-phosphate
  modified_base 9: mod_base = OTHER; note = 2'-fluoroguanosine-3'-phosphate
  modified_base 10: mod_base = OTHER; note = 2'-O-methyladenosine-3'-phosphate
  modified_base 11: mod_base = OTHER; note = 2'-fluoroguanosine-3'-phosphate
  modified_base 12: mod_base = OTHER; note = 2'-O-methylguanosine-3'-phosphate
  modified_base 13: mod_base = OTHER; note = 2'-fluorocytidine-3'-phosphate
  modified_base 14: mod_base = OTHER; note = 2'-O-methylguanosine-3'-phosphate
  modified_base 15: mod_base = OTHER; note = 2'-fluorocytidine-3'-phosphate
  modified_base 16: mod_base = OTHER; note = 2'-O-methyluridine-3'-phosphate
  modified_base 17: mod_base = OTHER; note = 2'-fluorouridine-3'-phosphorothioate
  modified_base 18: mod_base = OTHER; note = 2'-O-methyluridine-3'-phosphorothioate
  modified_base 19: mod_base = OTHER; note 2'-fluoroadenosine-3'-phosphate-N,N'-((5S)-6-((6-hydroxy-5- (lambda-3-methyl)hexyl)amino)-6-oxohexane-1,5-diyl)ditetrad ecanamide
gcctatcggaggcgcttta

SEQ ID NO: 1200 - RNA, 19 nt, synthetic construct
  source 1..19: mol_type = other RNA
  modified_base 1: mod_base = OTHER; note = 2'-fluoroguanosine-3'-phosphorothioate
  modified_base 2: mod_base = OTHER; note = 2'-O-methyladenosine-3'-phosphorothioate
  modified_base 3: mod_base = OTHER; note = 2'-fluoroadenosine-3'-phosphate
  modified_base 4: mod_base = OTHER; note = 2'-O-methylcytidine-3'-phosphate
  modified_base 5: mod_base = OTHER; note = 2'-fluorocytidine-3'-phosphate
  modified_base 6: mod_base = OTHER; note = 2'-O-methylcytidine-3'-phosphate
  modified_base 7: mod_base = OTHER; note = 2'-fluorouridine-3'-phosphate
  modified_base 8: mod_base = OTHER; note = 2'-O-methyladenosine-3'-phosphate
  modified_base 9: mod_base = OTHER; note = 2'-fluoroguanosine-3'-phosphate
  modified_base 10: mod_base = OTHER; note = 2'-O-methyladenosine-3'-phosphate
  modified_base 11: mod_base = OTHER; note = 2'-fluoroadenosine-3'-phosphate
  modified_base 12: mod_base = OTHER; note = 2'-O-methylcytidine-3'-phosphate
  modified_base 13: mod_base = OTHER; note = 2'-fluorouridine-3'-phosphate
  modified_base 14: mod_base = OTHER; note = 2'-O-methylguanosine-3'-phosphate
  modified_base 15: mod_base = OTHER; note = 2'-fluorouridine-3'-phosphate
  modified_base 16: mod_base = OTHER; note = 2'-O-methylcytidine-3'-phosphate
  modified_base 17: mod_base = OTHER; note = 2'-fluorouridine-3'-phosphorothioate
  modified_base 18: mod_base = OTHER; note = 2'-O-methyluridine-3'-phosphorothioate
  modified_base 19: mod_base = OTHER; note 2'-fluorouridine-3'-phosphate-N,N'-((5S)-6-((6-hydroxy-5-(l ambda-3-methyl)hexyl)amino)-6-oxohexane-1,5-diyl)ditetradec anamide
gaaccctagaactgtcttt

SEQ ID NO: 1201 - RNA, 19 nt, synthetic construct
  source 1..19: mol_type = other RNA
  modified_base 1: mod_base = OTHER; note = 2'-fluoroadenosine-3'-phosphorothioate
  modified_base 2: mod_base = OTHER; note = 2'-O-methyladenosine-3'-phosphorothioate
  modified_base 3: mod_base = OTHER; note = 2'-fluorocytidine-3'-phosphate
  modified_base 4: mod_base = OTHER; note = 2'-O-methylcytidine-3'-phosphate
  modified_base 5: mod_base = OTHER; note = 2'-fluorocytidine-3'-phosphate
  modified_base 6: mod_base = OTHER; note = 2'-O-methyluridine-3'-phosphate
  modified_base 7: mod_base = OTHER; note = 2'-fluoroadenosine-3'-phosphate
  modified_base 8: mod_base = OTHER; note = 2'-O-methylguanosine-3'-phosphate
  modified_base 9: mod_base = OTHER; note = 2'-fluoroadenosine-3'-phosphate
  modified_base 10: mod_base = OTHER; note = 2'-O-methyladenosine-3'-phosphate
  modified_base 11: mod_base = OTHER; note = 2'-fluorocytidine-3'-phosphate
  modified_base 12: mod_base = OTHER; note = 2'-O-methyluridine-3'-phosphate
  modified_base 13: mod_base = OTHER; note = 2'-fluoroguanosine-3'-phosphate
  modified_base 14: mod_base = OTHER; note = 2'-O-methyluridine-3'-phosphate
  modified_base 15: mod_base = OTHER; note = 2'-fluorocytidine-3'-phosphate
  modified_base 16: mod_base = OTHER; note = 2'-O-methyluridine-3'-phosphate
  modified_base 17: mod_base = OTHER; note = 2'-fluorouridine-3'-phosphorothioate
  modified_base 18: mod_base = OTHER; note = 2'-O-methylcytidine-3'-phosphorothioate
  modified_base 19: mod_base = OTHER; note 2'-fluorouridine-3'-phosphate-N,N'-((5S)-6-((6-hydroxy-5-(l ambda-3-methyl)hexyl)amino)-6-oxohexane-1,5-diyl)ditetradec anamide
aaccctagaactgtcttct

SEQ ID NO: 1202 - RNA, 19 nt, synthetic construct
  source 1..19: mol_type = other RNA
  modified_base 1: mod_base = OTHER; note = 2'-fluorouridine-3'-phosphorothioate
  modified_base 2: mod_base = OTHER; note = 2'-O-methyluridine-3'-phosphorothioate
  modified_base 3: mod_base = OTHER; note = 2'-fluoroadenosine-3'-phosphate
  modified_base 4: mod_base = OTHER; note = 2'-O-methylcytidine-3'-phosphate
  modified_base 5: mod_base = OTHER; note = 2'-fluorouridine-3'-phosphate
  modified_base 6: mod_base = OTHER; note = 2'-O-methylcytidine-3'-phosphate
  modified_base 7: mod_base = OTHER; note = 2'-fluoroguanosine-3'-phosphate
  modified_base 8: mod_base = OTHER; note = 2'-O-methylguanosine-3'-phosphate
  modified_base 9: mod_base = OTHER; note = 2'-fluoroguanosine-3'-phosphate
  modified_base 10: mod_base = OTHER; note = 2'-O-methyladenosine-3'-phosphate
  modified_base 11: mod_base = OTHER; note = 2'-fluoroadenosine-3'-phosphate
  modified_base 12: mod_base = OTHER; note = 2'-O-methyladenosine-3'-phosphate
  modified_base 13: mod_base = OTHER; note = 2'-fluorouridine-3'-phosphate
  modified_base 14: mod_base = OTHER; note = 2'-O-methyluridine-3'-phosphate
  modified_base 15: mod_base = OTHER; note = 2'-fluorouridine-3'-phosphate
  modified_base 16: mod_base = OTHER; note = 2'-O-methylguanosine-3'-phosphate
  modified_base 17: mod_base = OTHER; note = 2'-fluorocytidine-3'-phosphorothioate
  modified_base 18: mod_base = OTHER; note = 2'-O-methyluridine-3'-phosphorothioate
  modified_base 19: mod_base = OTHER; note 2'-fluorouridine-3'-phosphate-N,N'-((5S)-6-((6-hydroxy-5-(l ambda-3-methyl)hexyl)amino)-6-oxohexane-1,5-diyl)ditetradec anamide
ttactcgggaaatttgctt

SEQ ID NO: 1203 - RNA, 19 nt, synthetic construct
  source 1..19: mol_type = other RNA
  modified_base 1: mod_base = OTHER; note = 2'-fluorouridine-3'-phosphorothioate
  modified_base 2: mod_base = OTHER; note = 2'-O-methylcytidine-3'-phosphorothioate
  modified_base 3: mod_base = OTHER; note = 2'-fluoroguanosine-3'-phosphate
  modified_base 4: mod_base = OTHER; note = 2'-O-methylguanosine-3'-phosphate
  modified_base 5: mod_base = OTHER; note = 2'-fluoroguanosine-3'-phosphate
  modified_base 6: mod_base = OTHER; note = 2'-O-methyladenosine-3'-phosphate
  modified_base 7: mod_base = OTHER; note = 2'-fluoroadenosine-3'-phosphate
  modified_base 8: mod_base = OTHER; note = 2'-O-methyladenosine-3'-phosphate
  modified_base 9: mod_base = OTHER; note = 2'-fluorouridine-3'-phosphate
  modified_base 10: mod_base = OTHER; note = 2'-O-methyluridine-3'-phosphate
  modified_base 11: mod_base = OTHER; note = 2'-fluorouridine-3'-phosphate
  modified_base 12: mod_base = OTHER; note = 2'-O-methylguanosine-3'-phosphate
  modified_base 13: mod_base = OTHER; note = 2'-fluorocytidine-3'-phosphate
  modified_base 14: mod_base = OTHER; note = 2'-O-methyluridine-3'-phosphate
  modified_base 15: mod_base = OTHER; note = 2'-fluorouridine-3'-phosphate
  modified_base 16: mod_base = OTHER; note = 2'-O-methyluridine-3'-phosphate
  modified_base 17: mod_base = OTHER; note = 2'-fluorouridine-3'-phosphorothioate
  modified_base 18: mod_base = OTHER; note = 2'-O-methylguanosine-3'-phosphorothioate
  modified_base 19: mod_base = OTHER; note 2'-fluorouridine-3'-phosphate-N,N'-((5S)-6-((6-hydroxy-5-(l ambda-3-methyl)hexyl)amino)-6-oxohexane-1,5-diyl)ditetradec anamide
tcgggaaatttgcttttgt

SEQ ID NO: 1204 - RNA, 19 nt, synthetic construct
  source 1..19: mol_type = other RNA
  modified_base 1: mod_base = OTHER; note = 2'-fluoroguanosine-3'-phosphorothioate
  modified_base 2: mod_base = OTHER; note = 2'-O-methyladenosine-3'-phosphorothioate
  modified_base 3: mod_base = OTHER; note = 2'-fluoroadenosine-3'-phosphate
  modified_base 4: mod_base = OTHER; note = 2'-O-methyladenosine-3'-phosphate
  modified_base 5: mod_base = OTHER; note = 2'-fluorouridine-3'-phosphate
  modified_base 6: mod_base = OTHER; note = 2'-O-methyluridine-3'-phosphate
  modified_base 7: mod_base = OTHER; note = 2'-fluorouridine-3'-phosphate
  modified_base 8: mod_base = OTHER; note = 2'-O-methylguanosine-3'-phosphate
  modified_base 9: mod_base = OTHER; note = 2'-fluorocytidine-3'-phosphate
  modified_base 10: mod_base = OTHER; note = 2'-O-methyluridine-3'-phosphate
  modified_base 11: mod_base = OTHER; note = 2'-fluorouridine-3'-phosphate
  modified_base 12: mod_base = OTHER; note = 2'-O-methyluridine-3'-phosphate
  modified_base 13: mod_base = OTHER; note = 2'-fluorouridine-3'-phosphate
  modified_base 14: mod_base = OTHER; note = 2'-O-methylguanosine-3'-phosphate
  modified_base 15: mod_base = OTHER; note = 2'-fluorocytidine-3'-phosphate
  modified_base 16: mod_base = OTHER; note = 2'-O-methylcytidine-3'-phosphate
  modified_base 17: mod_base = OTHER; note = 2'-fluoroadenosine-3'-phosphorothioate
  modified_base 18: mod_base = OTHER; note = 2'-O-methyladenosine-3'-phosphorothioate
  modified_base 19: mod_base = OTHER; note 2'-fluoroadenosine-3'-phosphate-N,N'-((5S)-6-((6-hydroxy-5- (lambda-3-methyl)hexyl)amino)-6-oxohexane-1,5-diyl)ditetrad ecanamide
gaaatttgcttttgccaaa

SEQ ID NO: 1205 - RNA, 19 nt, synthetic construct
  source 1..19: mol_type = other RNA
  modified_base 1: mod_base = OTHER; note = 2'-fluorocytidine-3'-phosphorothioate
  modified_base 2: mod_base = OTHER; note = 2'-O-methyluridine-3'-phosphorothioate
  modified_base 3: mod_base = OTHER; note = 2'-fluorouridine-3'-phosphate
  modified_base 4: mod_base = OTHER; note = 2'-O-methylcytidine-3'-phosphate
  modified_base 5: mod_base = OTHER; note = 2'-fluoroguanosine-3'-phosphate
  modified_base 6: mod_base = OTHER; note = 2'-O-methylguanosine-3'-phosphate
  modified_base 7: mod_base = OTHER; note = 2'-fluorocytidine-3'-phosphate
  modified_base 8: mod_base = OTHER; note = 2'-O-methylguanosine-3'-phosphate
  modified_base 9: mod_base = OTHER; note = 2'-fluoroguanosine-3'-phosphate
  modified_base 10: mod_base = OTHER; note = 2'-O-methyluridine-3'-phosphate
  modified_base 11: mod_base = OTHER; note = 2'-fluorouridine-3'-phosphate
  modified_base 12: mod_base = OTHER; note = 2'-O-methyluridine-3'-phosphate
  modified_base 13: mod_base = OTHER; note = 2'-fluoroguanosine-3'-phosphate
  modified_base 14: mod_base = OTHER; note = 2'-O-methylguanosine-3'-phosphate
  modified_base 15: mod_base = OTHER; note = 2'-fluoroadenosine-3'-phosphate
  modified_base 16: mod_base = OTHER; note = 2'-O-methyluridine-3'-phosphate
  modified_base 17: mod_base = OTHER; note = 2'-fluoroadenosine-3'-phosphorothioate
  modified_base 18: mod_base = OTHER; note = 2'-O-methyluridine-3'-phosphorothioate
  modified_base 19: mod_base = OTHER; note 2'-fluorouridine-3'-phosphate-N,N'-((5S)-6-((6-hydroxy-5-(l ambda-3-methyl)hexyl)amino)-6-oxohexane-1,5-diyl)ditetradec anamide
cttcggcggtttggatatt

SEQ ID NO: 1206 - RNA, 19 nt, synthetic construct
  source 1..19: mol_type = other RNA
  modified_base 1: mod_base = OTHER; note = 2'-fluorouridine-3'-phosphorothioate
  modified_base 2: mod_base = OTHER; note = 2'-O-methylcytidine-3'-phosphorothioate
  modified_base 3: mod_base = OTHER; note = 2'-fluoroguanosine-3'-phosphate
  modified_base 4: mod_base = OTHER; note = 2'-O-methylguanosine-3'-phosphate
  modified_base 5: mod_base = OTHER; note = 2'-fluorocytidine-3'-phosphate
  modified_base 6: mod_base = OTHER; note = 2'-O-methylguanosine-3'-phosphate
  modified_base 7: mod_base = OTHER; note = 2'-fluoroguanosine-3'-phosphate
  modified_base 8: mod_base = OTHER; note = 2'-O-methyluridine-3'-phosphate
  modified_base 9: mod_base = OTHER; note = 2'-fluorouridine-3'-phosphate
  modified_base 10: mod_base = OTHER; note = 2'-O-methyluridine-3'-phosphate
  modified_base 11: mod_base = OTHER; note = 2'-fluoroguanosine-3'-phosphate
  modified_base 12: mod_base = OTHER; note = 2'-O-methylguanosine-3'-phosphate
  modified_base 13: mod_base = OTHER; note = 2'-fluoroadenosine-3'-phosphate
  modified_base 14: mod_base = OTHER; note = 2'-O-methyluridine-3'-phosphate
  modified_base 15: mod_base = OTHER; note = 2'-fluoroadenosine-3'-phosphate
  modified_base 16: mod_base = OTHER; note = 2'-O-methyluridine-3'-phosphate
  modified_base 17: mod_base = OTHER; note = 2'-fluorouridine-3'-phosphorothioate
  modified_base 18: mod_base = OTHER; note = 2'-O-methyluridine-3'-phosphorothioate
  modified_base 19: mod_base = OTHER; note 2'-fluoroadenosine-3'-phosphate-N,N'-((5S)-6-((6-hydroxy-5- (lambda-3-methyl)hexyl)amino)-6-oxohexane-1,5-diyl)ditetrad ecanamide
tcggcggtttggatattta

SEQ ID NO: 1207 - RNA, 19 nt, synthetic construct
  source 1..19: mol_type = other RNA
  modified_base 1: mod_base = OTHER; note = 2'-fluorocytidine-3'-phosphorothioate
  modified_base 2: mod_base = OTHER; note = 2'-O-methylguanosine-3'-phosphorothioate
  modified_base 3: mod_base = OTHER; note = 2'-fluoroguanosine-3'-phosphate
  modified_base 4: mod_base = OTHER; note = 2'-O-methyluridine-3'-phosphate
  modified_base 5: mod_base = OTHER; note = 2'-fluorouridine-3'-phosphate
  modified_base 6: mod_base = OTHER; note = 2'-O-methyluridine-3'-phosphate
  modified_base 7: mod_base = OTHER; note = 2'-fluoroguanosine-3'-phosphate
  modified_base 8: mod_base = OTHER; note = 2'-O-methylguanosine-3'-phosphate
  modified_base 9: mod_base = OTHER; note = 2'-fluoroadenosine-3'-phosphate
  modified_base 10: mod_base = OTHER; note = 2'-O-methyluridine-3'-phosphate
  modified_base 11: mod_base = OTHER; note = 2'-fluoroadenosine-3'-phosphate
  modified_base 12: mod_base = OTHER; note = 2'-O-methyluridine-3'-phosphate
  modified_base 13: mod_base = OTHER; note = 2'-fluorouridine-3'-phosphate
  modified_base 14: mod_base = OTHER; note = 2'-O-methyluridine-3'-phosphate
  modified_base 15: mod_base = OTHER; note = 2'-fluoroadenosine-3'-phosphate
  modified_base 16: mod_base = OTHER; note = 2'-O-methyluridine-3'-phosphate
  modified_base 17: mod_base = OTHER; note = 2'-fluorouridine-3'-phosphorothioate
  modified_base 18: mod_base = OTHER; note = 2'-O-methylguanosine-3'-phosphorothioate
  modified_base 19: mod_base = OTHER; note 2'-fluoroadenosine-3'-phosphate-N,N'-((5S)-6-((6-hydroxy-5- (lambda-3-methyl)hexyl)amino)-6-oxohexane-1,5-diyl)ditetrad ecanamide
cggtttggatatttattga

SEQ ID NO: 1208 - RNA, 19 nt, synthetic construct
  source 1..19: mol_type = other RNA
  modified_base 1: mod_base = OTHER; note = 2'-fluoroguanosine-3'-phosphorothioate
  modified_base 2: mod_base = OTHER; note = 2'-O-methylguanosine-3'-phosphorothioate
  modified_base 3: mod_base = OTHER; note = 2'-fluorouridine-3'-phosphate
  modified_base 4: mod_base = OTHER; note = 2'-O-methyluridine-3'-phosphate
  modified_base 5: mod_base = OTHER; note = 2'-fluorouridine-3'-phosphate
  modified_base 6: mod_base = OTHER; note = 2'-O-methylguanosine-3'-phosphate
  modified_base 7: mod_base = OTHER; note = 2'-fluoroguanosine-3'-phosphate
  modified_base 8: mod_base = OTHER; note = 2'-O-methyladenosine-3'-phosphate
  modified_base 9: mod_base = OTHER; note = 2'-fluorouridine-3'-phosphate
  modified_base 10: mod_base = OTHER; note = 2'-O-methyladenosine-3'-phosphate
  modified_base 11: mod_base = OTHER; note = 2'-fluorouridine-3'-phosphate
  modified_base 12: mod_base = OTHER; note = 2'-O-methyluridine-3'-phosphate
  modified_base 13: mod_base = OTHER; note = 2'-fluorouridine-3'-phosphate
  modified_base 14: mod_base = OTHER; note = 2'-O-methyladenosine-3'-phosphate
  modified_base 15: mod_base = OTHER; note = 2'-fluorouridine-3'-phosphate
  modified_base 16: mod_base = OTHER; note = 2'-O-methyluridine-3'-phosphate
  modified_base 17: mod_base = OTHER; note = 2'-fluoroguanosine-3'-phosphorothioate
  modified_base 18: mod_base = OTHER; note = 2'-O-methyladenosine-3'-phosphorothioate
  modified_base 19: mod_base = OTHER; note 2'-fluorouridine-3'-phosphate-N,N'-((5S)-6-((6-hydroxy-5-(l ambda-3-methyl)hexyl)amino)-6-oxohexane-1,5-diyl)ditetradec anamide
ggtttggatatttattgat

SEQ ID NO: 1209 - RNA, 19 nt, synthetic construct
  source 1..19: mol_type = other RNA
  modified_base 1: mod_base = OTHER; note = 2'-fluoroguanosine-3'-phosphorothioate
  modified_base 2: mod_base = OTHER; note = 2'-O-methyluridine-3'-phosphorothioate
  modified_base 3: mod_base = OTHER; note = 2'-fluorouridine-3'-phosphate
  modified_base 4: mod_base = OTHER; note = 2'-O-methyluridine-3'-phosphate
  modified_base 5: mod_base = OTHER; note = 2'-fluoroguanosine-3'-phosphate
  modified_base 6: mod_base = OTHER; note = 2'-O-methylguanosine-3'-phosphate
  modified_base 7: mod_base = OTHER; note = 2'-fluoroadenosine-3'-phosphate
  modified_base 8: mod_base = OTHER; note = 2'-O-methyluridine-3'-phosphate
  modified_base 9: mod_base = OTHER; note = 2'-fluoroadenosine-3'-phosphate
  modified_base 10: mod_base = OTHER; note = 2'-O-methyluridine-3'-phosphate
  modified_base 11: mod_base = OTHER; note = 2'-fluorouridine-3'-phosphate
  modified_base 12: mod_base = OTHER; note = 2'-O-methyluridine-3'-phosphate
  modified_base 13: mod_base = OTHER; note = 2'-fluoroadenosine-3'-phosphate
  modified_base 14: mod_base = OTHER; note = 2'-O-methyluridine-3'-phosphate
  modified_base 15: mod_base = OTHER; note = 2'-fluorouridine-3'-phosphate
  modified_base 16: mod_base = OTHER; note = 2'-O-methylguanosine-3'-phosphate
  modified_base 17: mod_base = OTHER; note = 2'-fluoroadenosine-3'-phosphorothioate
  modified_base 18: mod_base = OTHER; note = 2'-O-methylcytidine-3'-phosphorothioate
  modified_base 19: mod_base = OTHER; note 2'-fluorouridine-3'-phosphate-N,N'-((5S)-6-((6-hydroxy-5-(l ambda-3-methyl)hexyl)amino)-6-oxohexane-1,5-diyl)ditetradec anamide
gtttggatatttattgact

SEQ ID NO: 1210 - RNA, 19 nt, synthetic construct
  source 1..19: mol_type = other RNA
  modified_base 1: mod_base = OTHER; note = 2'-fluoroguanosine-3'-phosphorothioate
  modified_base 2: mod_base = OTHER; note = 2'-O-methylguanosine-3'-phosphorothioate
  modified_base 3: mod_base = OTHER; note = 2'-fluoroadenosine-3'-phosphate
  modified_base 4: mod_base = OTHER; note = 2'-O-methyluridine-3'-phosphate
  modified_base 5: mod_base = OTHER; note = 2'-fluoroadenosine-3'-phosphate
  modified_base 6: mod_base = OTHER; note = 2'-O-methyluridine-3'-phosphate
  modified_base 7: mod_base = OTHER; note = 2'-fluorouridine-3'-phosphate
  modified_base 8: mod_base = OTHER; note = 2'-O-methyluridine-3'-phosphate
  modified_base 9: mod_base = OTHER; note = 2'-fluoroadenosine-3'-phosphate
  modified_base 10: mod_base = OTHER; note = 2'-O-methyluridine-3'-phosphate
  modified_base 11: mod_base = OTHER; note = 2'-fluorouridine-3'-phosphate
  modified_base 12: mod_base = OTHER; note = 2'-O-methylguanosine-3'-phosphate
  modified_base 13: mod_base = OTHER; note = 2'-fluoroadenosine-3'-phosphate
  modified_base 14: mod_base = OTHER; note = 2'-O-methylcytidine-3'-phosphate
  modified_base 15: mod_base = OTHER; note = 2'-fluorocytidine-3'-phosphate
  modified_base 16: mod_base = OTHER; note = 2'-O-methyluridine-3'-phosphate
  modified_base 17: mod_base = OTHER; note = 2'-fluorocytidine-3'-phosphorothioate
  modified_base 18: mod_base = OTHER; note = 2'-O-methylguanosine-3'-phosphorothioate
  modified_base 19: mod_base = OTHER; note 2'-fluorouridine-3'-phosphate-N,N'-((5S)-6-((6-hydroxy-5-(l ambda-3-methyl)hexyl)amino)-6-oxohexane-1,5-diyl)ditetradec anamide
ggatatttattgacctcgt

SEQ ID NO: 1211 - RNA, 19 nt, synthetic construct
  source 1..19: mol_type = other RNA
  modified_base 1: mod_base = OTHER; note = 2'-fluoroguanosine-3'-phosphorothioate
  modified_base 2: mod_base = OTHER; note = 2'-O-methyladenosine-3'-phosphorothioate
  modified_base 3: mod_base = OTHER; note = 2'-fluorouridine-3'-phosphate
  modified_base 4: mod_base = OTHER; note = 2'-O-methyladenosine-3'-phosphate
  modified_base 5: mod_base = OTHER; note = 2'-fluorouridine-3'-phosphate
  modified_base 6: mod_base = OTHER; note = 2'-O-methyluridine-3'-phosphate
  modified_base 7: mod_base = OTHER; note = 2'-fluorouridine-3'-phosphate
  modified_base 8: mod_base = OTHER; note = 2'-O-methyladenosine-3'-phosphate
  modified_base 9: mod_base = OTHER; note = 2'-fluorouridine-3'-phosphate
  modified_base 10: mod_base = OTHER; note = 2'-O-methyluridine-3'-phosphate
  modified_base 11: mod_base = OTHER; note = 2'-fluoroguanosine-3'-phosphate
  modified_base 12: mod_base = OTHER; note = 2'-O-methyladenosine-3'-phosphate
  modified_base 13: mod_base = OTHER; note = 2'-fluorocytidine-3'-phosphate
  modified_base 14: mod_base = OTHER; note = 2'-O-methylcytidine-3'-phosphate
  modified_base 15: mod_base = OTHER; note = 2'-fluorouridine-3'-phosphate
  modified_base 16: mod_base = OTHER; note = 2'-O-methylcytidine-3'-phosphate
  modified_base 17: mod_base = OTHER; note = 2'-fluoroguanosine-3'-phosphorothioate
  modified_base 18: mod_base = OTHER; note = 2'-O-methyluridine-3'-phosphorothioate
  modified_base 19: mod_base = OTHER; note 2'-fluoroadenosine-3'-phosphate-N,N'-((5S)-6-((6-hydroxy-5- (lambda-3-methyl)hexyl)amino)-6-oxohexane-1,5-diyl)ditetrad ecanamide
gatatttattgacctcgta

SEQ ID NO: 1212 - RNA, 19 nt, synthetic construct
  source 1..19: mol_type = other RNA
  modified_base 1: mod_base = OTHER; note = 2'-fluoroadenosine-3'-phosphorothioate
  modified_base 2: mod_base = OTHER; note = 2'-O-methyluridine-3'-phosphorothioate
  modified_base 3: mod_base = OTHER; note = 2'-fluoroadenosine-3'-phosphate
  modified_base 4: mod_base = OTHER; note = 2'-O-methyluridine-3'-phosphate
  modified_base 5: mod_base = OTHER; note = 2'-fluorouridine-3'-phosphate
  modified_base 6: mod_base = OTHER; note = 2'-O-methyluridine-3'-phosphate
  modified_base 7: mod_base = OTHER; note = 2'-fluoroadenosine-3'-phosphate
  modified_base 8: mod_base = OTHER; note = 2'-O-methyluridine-3'-phosphate
  modified_base 9: mod_base = OTHER; note = 2'-fluorouridine-3'-phosphate
  modified_base 10: mod_base = OTHER; note = 2'-O-methylguanosine-3'-phosphate
  modified_base 11: mod_base = OTHER; note = 2'-fluoroadenosine-3'-phosphate
  modified_base 12: mod_base = OTHER; note = 2'-O-methylcytidine-3'-phosphate
  modified_base 13: mod_base = OTHER; note = 2'-fluorocytidine-3'-phosphate
  modified_base 14: mod_base = OTHER; note = 2'-O-methyluridine-3'-phosphate
  modified_base 15: mod_base = OTHER; note = 2'-fluorocytidine-3'-phosphate
  modified_base 16: mod_base = OTHER; note = 2'-O-methylguanosine-3'-phosphate
  modified_base 17: mod_base = OTHER; note = 2'-fluorouridine-3'-phosphorothioate
  modified_base 18: mod_base = OTHER; note = 2'-O-methylcytidine-3'-phosphorothioate
  modified_base 19: mod_base = OTHER; note 2'-fluorouridine-3'-phosphate-N,N'-((5S)-6-((6-hydroxy-5-(l ambda-3-methyl)hexyl)amino)-6-oxohexane-1,5-diyl)ditetradec anamide
atatttattgacctcgtct

SEQ ID NO: 1213 - RNA, 19 nt, synthetic construct
  source 1..19: mol_type = other RNA
  modified_base 1: mod_base = OTHER; note = 2'-fluorocytidine-3'-phosphorothioate
  modified_base 2: mod_base = OTHER; note = 2'-O-methylcytidine-3'-phosphorothioate
  modified_base 3: mod_base = OTHER; note = 2'-fluorocytidine-3'-phosphate
  modified_base 4: mod_base = OTHER; note = 2'-O-methyladenosine-3'-phosphate
  modified_base 5: mod_base = OTHER; note = 2'-fluoroadenosine-3'-phosphate
  modified_base 6: mod_base = OTHER; note = 2'-O-methyluridine-3'-phosphate
  modified_base 7: mod_base = OTHER; note = 2'-fluorocytidine-3'-phosphate
  modified_base 8: mod_base = OTHER; note = 2'-O-methylcytidine-3'-phosphate
  modified_base 9: mod_base = OTHER; note = 2'-fluoroadenosine-3'-phosphate
  modified_base 10: mod_base = OTHER; note = 2'-O-methylcytidine-3'-phosphate
  modified_base 11: mod_base = OTHER; note = 2'-fluoroguanosine-3'-phosphate
  modified_base 12: mod_base = OTHER; note = 2'-O-methyluridine-3'-phosphate
  modified_base 13: mod_base = OTHER; note = 2'-fluorouridine-3'-phosphate
  modified_base 14: mod_base = OTHER; note = 2'-O-methyluridine-3'-phosphate
  modified_base 15: mod_base = OTHER; note = 2'-fluorouridine-3'-phosphate
  modified_base 16: mod_base = OTHER; note = 2'-O-methylguanosine-3'-phosphate
  modified_base 17: mod_base = OTHER; note = 2'-fluoroguanosine-3'-phosphorothioate
  modified_base 18: mod_base = OTHER; note = 2'-O-methyladenosine-3'-phosphorothioate
  modified_base 19: mod_base = OTHER; note 2'-fluorouridine-3'-phosphate-N,N'-((5S)-6-((6-hydroxy-5-(l ambda-3-methyl)hexyl)amino)-6-oxohexane-1,5-diyl)ditetradec anamide
cccaatccacgttttggat

SEQ ID NO: 1214 - RNA, 19 nt, synthetic construct
  source 1..19: mol_type = other RNA
  modified_base 1: mod_base = OTHER; note = 2'-fluoroadenosine-3'-phosphorothioate
  modified_base 2: mod_base = OTHER; note = 2'-O-methyluridine-3'-phosphorothioate
  modified_base 3: mod_base = OTHER; note = 2'-fluorocytidine-3'-phosphate
  modified_base 4: mod_base = OTHER; note = 2'-O-methylcytidine-3'-phosphate
  modified_base 5: mod_base = OTHER; note = 2'-fluoroadenosine-3'-phosphate
  modified_base 6: mod_base = OTHER; note = 2'-O-methylcytidine-3'-phosphate
  modified_base 7: mod_base = OTHER; note = 2'-fluoroguanosine-3'-phosphate
  modified_base 8: mod_base = OTHER; note = 2'-O-methyluridine-3'-phosphate
  modified_base 9: mod_base = OTHER; note = 2'-fluorouridine-3'-phosphate
  modified_base 10: mod_base = OTHER; note = 2'-O-methyluridine-3'-phosphate
  modified_base 11: mod_base = OTHER; note = 2'-fluorouridine-3'-phosphate
  modified_base 12: mod_base = OTHER; note = 2'-O-methylguanosine-3'-phosphate
  modified_base 13: mod_base = OTHER; note = 2'-fluoroguanosine-3'-phosphate
  modified_base 14: mod_base = OTHER; note = 2'-O-methyladenosine-3'-phosphate
  modified_base 15: mod_base = OTHER; note = 2'-fluorouridine-3'-phosphate
  modified_base 16: mod_base = OTHER; note = 2'-O-methylguanosine-3'-phosphate
  modified_base 17: mod_base = OTHER; note = 2'-fluorocytidine-3'-phosphorothioate
  modified_base 18: mod_base = OTHER; note = 2'-O-methyladenosine-3'-phosphorothioate
  modified_base 19: mod_base = OTHER; note 2'-fluorouridine-3'-phosphate-N,N'-((5S)-6-((6-hydroxy-5-(l ambda-3-methyl)hexyl)amino)-6-oxohexane-1,5-diyl)ditetradec anamide
atccacgttttggatgcat

SEQ ID NO: 1215 - RNA, 19 nt, synthetic construct
  source 1..19: mol_type = other RNA
  modified_base 1: mod_base = OTHER; note = 2'-fluorocytidine-3'-phosphorothioate
  modified_base 2: mod_base = OTHER; note = 2'-O-methylcytidine-3'-phosphorothioate
  modified_base 3: mod_base = OTHER; note = 2'-fluoroadenosine-3'-phosphate
  modified_base 4: mod_base = OTHER; note = 2'-O-methylcytidine-3'-phosphate
  modified_base 5: mod_base = OTHER; note = 2'-fluoroguanosine-3'-phosphate
  modified_base 6: mod_base = OTHER; note = 2'-O-methyluridine-3'-phosphate
  modified_base 7: mod_base = OTHER; note = 2'-fluorouridine-3'-phosphate
  modified_base 8: mod_base = OTHER; note = 2'-O-methyluridine-3'-phosphate
  modified_base 9: mod_base = OTHER; note = 2'-fluorouridine-3'-phosphate
  modified_base 10: mod_base = OTHER; note = 2'-O-methylguanosine-3'-phosphate
  modified_base 11: mod_base = OTHER; note = 2'-fluoroguanosine-3'-phosphate
  modified_base 12: mod_base = OTHER; note = 2'-O-methyladenosine-3'-phosphate
  modified_base 13: mod_base = OTHER; note = 2'-fluorouridine-3'-phosphate
  modified_base 14: mod_base = OTHER; note = 2'-O-methylguanosine-3'-phosphate
  modified_base 15: mod_base = OTHER; note = 2'-fluorocytidine-3'-phosphate
  modified_base 16: mod_base = OTHER; note = 2'-O-methyladenosine-3'-phosphate
  modified_base 17: mod_base = OTHER; note = 2'-fluorocytidine-3'-phosphorothioate
  modified_base 18: mod_base = OTHER; note = 2'-O-methyluridine-3'-phosphorothioate
  modified_base 19: mod_base = OTHER; note 2'-fluorouridine-3'-phosphate-N,N'-((5S)-6-((6-hydroxy-5-(l ambda-3-methyl)hexyl)amino)-6-oxohexane-1,5-diyl)ditetradec anamide
ccacgttttggatgcactt

SEQ ID NO: 1216 - RNA, 19 nt, synthetic construct
  source 1..19: mol_type = other RNA
  modified_base 1: mod_base = OTHER; note = 2'-fluorocytidine-3'-phosphorothioate
  modified_base 2: mod_base = OTHER; note = 2'-O-methylguanosine-3'-phosphorothioate
  modified_base 3: mod_base = OTHER; note = 2'-fluorouridine-3'-phosphate
  modified_base 4: mod_base = OTHER; note = 2'-O-methyluridine-3'-phosphate
  modified_base 5: mod_base = OTHER; note = 2'-fluorouridine-3'-phosphate
  modified_base 6: mod_base = OTHER; note = 2'-O-methyluridine-3'-phosphate
  modified_base 7: mod_base = OTHER; note = 2'-fluoroguanosine-3'-phosphate
  modified_base 8: mod_base = OTHER; note = 2'-O-methylguanosine-3'-phosphate
  modified_base 9: mod_base = OTHER; note = 2'-fluoroadenosine-3'-phosphate
  modified_base 10: mod_base = OTHER; note = 2'-O-methyluridine-3'-phosphate
  modified_base 11: mod_base = OTHER; note = 2'-fluoroguanosine-3'-phosphate
  modified_base 12: mod_base = OTHER; note = 2'-O-methylcytidine-3'-phosphate
  modified_base 13: mod_base = OTHER; note = 2'-fluoroadenosine-3'-phosphate
  modified_base 14: mod_base = OTHER; note = 2'-O-methylcytidine-3'-phosphate
  modified_base 15: mod_base = OTHER; note = 2'-fluorouridine-3'-phosphate
  modified_base 16: mod_base = OTHER; note = 2'-O-methylguanosine-3'-phosphate
  modified_base 17: mod_base = OTHER; note = 2'-fluoroadenosine-3'-phosphorothioate
  modified_base 18: mod_base = OTHER; note = 2'-O-methylguanosine-3'-phosphorothioate
  modified_base 19: mod_base = OTHER; note 2'-fluoroadenosine-3'-phosphate-N,N'-((5S)-6-((6-hydroxy-5- (lambda-3-methyl)hexyl)amino)-6-oxohexane-1,5-diyl)ditetrad ecanamide
cgttttggatgcactgaga

SEQ ID NO: 1217 - RNA, 21 nt, synthetic construct
  source 1..21: mol_type = other RNA
  modified_base 1: mod_base = OTHER; note = 5'-phosphate-2'-O-methyluridine-3'-phosphorothioate
  modified_base 2: mod_base = OTHER; note = 2'-fluoroadenosine-3'-phosphorothioate
  modified_base 3: mod_base = OTHER; note = 2'-O-methylguanosine-3'-phosphate
  modified_base 4: mod_base = OTHER; note = 2'-fluoroadenosine-3'-phosphate
  modified_base 5: mod_base = OTHER; note = 2'-O-methylcytidine-3'-phosphate
  modified_base 6: mod_base = OTHER; note = 2'-fluoroadenosine-3'-phosphate
  modified_base 7: mod_base = OTHER; note = 2'-O-methyladenosine-3'-phosphate
  modified_base 8: mod_base = OTHER; note = 2'-fluorouridine-3'-phosphate
  modified_base 9: mod_base = OTHER; note = 2'-O-methyladenosine-3'-phosphate
  modified_base 10: mod_base = OTHER; note = 2'-fluoroadenosine-3'-phosphate
  modified_base 11: mod_base = OTHER; note = 2'-O-methyladenosine-3'-phosphate
  modified_base 12: mod_base = OTHER; note = 2'-fluorouridine-3'-phosphate
  modified_base 13: mod_base = OTHER; note = 2'-O-methyladenosine-3'-phosphate
  modified_base 14: mod_base = OTHER; note = 2'-fluorocytidine-3'-phosphate
  modified_base 15: mod_base = OTHER; note = 2'-O-methylcytidine-3'-phosphate
  modified_base 16: mod_base = OTHER; note = 2'-fluoroguanosine-3'-phosphate
  modified_base 17: mod_base = OTHER; note = 2'-O-methyladenosine-3'-phosphate
  modified_base 18: mod_base = OTHER; note = 2'-fluoroguanosine-3'-phosphate
  modified_base 19: mod_base = OTHER; note = 2'-O-methylguanosine-3'-phosphorothioate
  modified_base 20: mod_base = OTHER; note = 2'-O-methyladenosine-3'-phosphorothioate
  modified_base 21: mod_base = OTHER; note = 2'-O-methyladenosine
tagacaataaataccgaggaa

SEQ ID NO: 1218 - RNA, 21 nt, synthetic construct
  source 1..21: mol_type = other RNA
  modified_base 1: mod_base = OTHER; note = 5'-phosphate-2'-O-methyluridine-3'-phosphorothioate
  modified_base 2: mod_base = OTHER; note = 2'-fluoroadenosine-3'-phosphorothioate
  modified_base 3: mod_base = OTHER; note = 2'-O-methylguanosine-3'-phosphate
  modified_base 4: mod_base = OTHER; note = 2'-fluoroguanosine-3'-phosphate
  modified_base 5: mod_base = OTHER; note = 2'-O-methyluridine-3'-phosphate
  modified_base 6: mod_base = OTHER; note = 2'-fluoroadenosine-3'-phosphate
  modified_base 7: mod_base = OTHER; note = 2'-O-methylguanosine-3'-phosphate
  modified_base 8: mod_base = OTHER; note = 2'-fluorouridine-3'-phosphate
  modified_base 9: mod_base = OTHER; note = 2'-O-methyluridine-3'-phosphate
  modified_base 10: mod_base = OTHER; note = 2'-fluorocytidine-3'-phosphate
  modified_base 11: mod_base = OTHER; note = 2'-O-methyluridine-3'-phosphate
  modified_base 12: mod_base = OTHER; note = 2'-fluorocytidine-3'-phosphate
  modified_base 13: mod_base = OTHER; note = 2'-O-methyladenosine-3'-phosphate
  modified_base 14: mod_base = OTHER; note = 2'-fluorouridine-3'-phosphate
  modified_base 15: mod_base = OTHER; note = 2'-O-methylcytidine-3'-phosphate
  modified_base 16: mod_base = OTHER; note = 2'-fluorocytidine-3'-phosphate
  modified_base 17: mod_base = OTHER; note = 2'-O-methyluridine-3'-phosphate
  modified_base 18: mod_base = OTHER; note = 2'-fluoroguanosine-3'-phosphate
  modified_base 19: mod_base = OTHER; note = 2'-O-methylguanosine-3'-phosphorothioate
  modified_base 20: mod_base = OTHER; note = 2'-O-methyladenosine-3'-phosphorothioate
  modified_base 21: mod_base = OTHER; note = 2'-O-methyladenosine
taggtagttctcatcctggaa

SEQ ID NO: 1219 - RNA, 21 nt, synthetic construct
  source 1..21: mol_type = other RNA
  modified_base 1: mod_base = OTHER; note = 5'-phosphate-2'-O-methyladenosine-3'-phosphorothioate
  modified_base 2: mod_base = OTHER; note = 2'-fluoroadenosine-3'-phosphorothioate
  modified_base 3: mod_base = OTHER; note = 2'-O-methyluridine-3'-phosphate
  modified_base 4: mod_base = OTHER; note = 2'-fluoroguanosine-3'-phosphate
  modified_base 5: mod_base = OTHER; note = 2'-O-methyluridine-3'-phosphate
  modified_base 6: mod_base = OTHER; note = 2'-fluorocytidine-3'-phosphate
  modified_base 7: mod_base = OTHER; note = 2'-O-methylcytidine-3'-phosphate
  modified_base 8: mod_base = OTHER; note = 2'-fluorocytidine-3'-phosphate
  modified_base 9: mod_base = OTHER; note = 2'-O-methyluridine-3'-phosphate
  modified_base 10: mod_base = OTHER; note = 2'-fluoroguanosine-3'-phosphate
  modified_base 11: mod_base = OTHER; note = 2'-O-methyluridine-3'-phosphate
  modified_base 12: mod_base = OTHER; note = 2'-fluoroguanosine-3'-phosphate
  modified_base 13: mod_base = OTHER; note = 2'-O-methylcytidine-3'-phosphate
  modified_base 14: mod_base = OTHER; note = 2'-fluoroadenosine-3'-phosphate
  modified_base 15: mod_base = OTHER; note = 2'-O-methylcytidine-3'-phosphate
  modified_base 16: mod_base = OTHER; note = 2'-fluoroguanosine-3'-phosphate
  modified_base 17: mod_base = OTHER; note = 2'-O-methyluridine-3'-phosphate
  modified_base 18: mod_base = OTHER; note = 2'-fluoroadenosine-3'-phosphate
  modified_base 19: mod_base = OTHER; note = 2'-O-methylguanosine-3'-phosphorothioate
  modified_base 20: mod_base = OTHER; note = 2'-O-methylcytidine-3'-phosphorothioate
  modified_base 21: mod_base = OTHER; note = 2'-O-methylcytidine
aatgtccctgtgcacgtagcc

SEQ ID NO: 1220 - RNA, 21 nt, synthetic construct
  source 1..21: mol_type = other RNA
  modified_base 1: mod_base = OTHER; note = 5'-phosphate-2'-O-methyladenosine-3'-phosphorothioate
  modified_base 2: mod_base = OTHER; note = 2'-fluoroguanosine-3'-phosphorothioate
  modified_base 3: mod_base = OTHER; note = 2'-O-methyluridine-3'-phosphate
  modified_base 4: mod_base = OTHER; note = 2'-fluorouridine-3'-phosphate
  modified_base 5: mod_base = OTHER; note = 2'-O-methyluridine-3'-phosphate
  modified_base 6: mod_base = OTHER; note = 2'-fluoroguanosine-3'-phosphate
  modified_base 7: mod_base = OTHER; note = 2'-O-methyladenosine-3'-phosphate
  modified_base 8: mod_base = OTHER; note = 2'-fluorouridine-3'-phosphate
  modified_base 9: mod_base = OTHER; note = 2'-O-methylguanosine-3'-phosphate
  modified_base 10: mod_base = OTHER; note = 2'-fluorouridine-3'-phosphate
  modified_base 11: mod_base = OTHER; note = 2'-O-methylcytidine-3'-phosphate
  modified_base 12: mod_base = OTHER; note = 2'-fluorocytidine-3'-phosphate
  modified_base 13: mod_base = OTHER; note = 2'-O-methylcytidine-3'-phosphate
  modified_base 14: mod_base = OTHER; note = 2'-fluorouridine-3'-phosphate
  modified_base 15: mod_base = OTHER; note = 2'-O-methylguanosine-3'-phosphate
  modified_base 16: mod_base = OTHER; note = 2'-fluorouridine-3'-phosphate
  modified_base 17: mod_base = OTHER; note = 2'-O-methylguanosine-3'-phosphate
  modified_base 18: mod_base = OTHER; note = 2'-fluorocytidine-3'-phosphate
  modified_base 19: mod_base = OTHER; note = 2'-O-methyladenosine-3'-phosphorothioate
  modified_base 20: mod_base = OTHER; note = 2'-O-methylcytidine-3'-phosphorothioate
  modified_base 21: mod_base = OTHER; note = 2'-O-methylguanosine
agtttgatgtccctgtgcacg

SEQ ID NO: 1221 - RNA, 21 nt, synthetic construct
  source 1..21: mol_type = other RNA
  modified_base 1: mod_base = OTHER; note = 5'-phosphate-2'-O-methyladenosine-3'-phosphorothioate
  modified_base 2: mod_base = OTHER; note = 2'-fluorouridine-3'-phosphorothioate
  modified_base 3: mod_base = OTHER; note = 2'-O-methylguanosine-3'-phosphate
  modified_base 4: mod_base = OTHER; note = 2'-fluoroguanosine-3'-phosphate
  modified_base 5: mod_base = OTHER; note = 2'-O-methylguanosine-3'-phosphate
  modified_base 6: mod_base = OTHER; note = 2'-fluoroadenosine-3'-phosphate
  modified_base 7: mod_base = OTHER; note = 2'-O-methyladenosine-3'-phosphate
  modified_base 8: mod_base = OTHER; note = 2'-fluoroguanosine-3'-phosphate
  modified_base 9: mod_base = OTHER; note = 2'-O-methylguanosine-3'-phosphate
  modified_base 10: mod_base = OTHER; note = 2'-fluorouridine-3'-phosphate
  modified_base 11: mod_base = OTHER; note = 2'-O-methylguanosine-3'-phosphate
  modified_base 12: mod_base = OTHER; note = 2'-fluoroguanosine-3'-phosphate
  modified_base 13: mod_base = OTHER; note = 2'-O-methyladenosine-3'-phosphate
  modified_base 14: mod_base = OTHER; note = 2'-fluorouridine-3'-phosphate
  modified_base 15: mod_base = OTHER; note = 2'-O-methylcytidine-3'-phosphate
  modified_base 16: mod_base = OTHER; note = 2'-fluorocytidine-3'-phosphate
  modified_base 17: mod_base = OTHER; note = 2'-O-methylguanosine-3'-phosphate
  modified_base 18: mod_base = OTHER; note = 2'-fluorouridine-3'-phosphate
  modified_base 19: mod_base = OTHER; note = 2'-O-methylguanosine-3'-phosphorothioate
  modified_base 20: mod_base = OTHER; note = 2'-O-methylguanosine-3'-phosphorothioate
  modified_base 21: mod_base = OTHER; note = 2'-O-methylcytidine
atgggaaggtggatccgtggc

SEQ ID NO: 1222 - RNA, 21 nt, synthetic construct
  source 1..21: mol_type = other RNA
  modified_base 1: mod_base = OTHER; note = 5'-phosphate-2'-O-methyladenosine-3'-phosphorothioate
  modified_base 2: mod_base = OTHER; note = 2'-fluorocytidine-3'-phosphorothioate
  modified_base 3: mod_base = OTHER; note = 2'-O-methyladenosine-3'-phosphate
  modified_base 4: mod_base = OTHER; note = 2'-fluoroadenosine-3'-phosphate
  modified_base 5: mod_base = OTHER; note = 2'-O-methyluridine-3'-phosphate
  modified_base 6: mod_base = OTHER; note = 2'-fluoroadenosine-3'-phosphate
  modified_base 7: mod_base = OTHER; note = 2'-O-methyladenosine-3'-phosphate
  modified_base 8: mod_base = OTHER; note = 2'-fluoroadenosine-3'-phosphate
  modified_base 9: mod_base = OTHER; note = 2'-O-methyluridine-3'-phosphate
  modified_base 10: mod_base = OTHER; note = 2'-fluoroadenosine-3'-phosphate
  modified_base 11: mod_base = OTHER; note = 2'-O-methylcytidine-3'-phosphate
  modified_base 12: mod_base = OTHER; note = 2'-fluorocytidine-3'-phosphate
  modified_base 13: mod_base = OTHER; note = 2'-O-methylguanosine-3'-phosphate
  modified_base 14: mod_base = OTHER; note = 2'-fluoroadenosine-3'-phosphate
  modified_base 15: mod_base = OTHER; note = 2'-O-methylguanosine-3'-phosphate
  modified_base 16: mod_base = OTHER; note = 2'-fluoroguanosine-3'-phosphate
  modified_base 17: mod_base = OTHER; note = 2'-O-methyladenosine-3'-phosphate
  modified_base 18: mod_base = OTHER; note = 2'-fluoroadenosine-3'-phosphate
  modified_base 19: mod_base = OTHER; note = 2'-O-methyluridine-3'-phosphorothioate
  modified_base 20: mod_base = OTHER; note = 2'-O-methylguanosine-3'-phosphorothioate
  modified_base 21: mod_base = OTHER; note = 2'-O-methyluridine
acaataaataccgaggaatgt

SEQ ID NO: 1223 - RNA, 21 nt, synthetic construct
  source 1..21: mol_type = other RNA
  modified_base 1: mod_base = OTHER; note = 5'-phosphate-2'-O-methyladenosine-3'-phosphorothioate
  modified_base 2: mod_base = OTHER; note = 2'-fluorocytidine-3'-phosphorothioate
  modified_base 3: mod_base = OTHER; note = 2'-O-methyladenosine-3'-phosphate
  modified_base 4: mod_base = OTHER; note = 2'-fluoroguanosine-3'-phosphate
  modified_base 5: mod_base = OTHER; note = 2'-O-methyladenosine-3'-phosphate
  modified_base 6: mod_base = OTHER; note = 2'-fluorocytidine-3'-phosphate
  modified_base 7: mod_base = OTHER; note = 2'-O-methyladenosine-3'-phosphate
  modified_base 8: mod_base = OTHER; note = 2'-fluoroadenosine-3'-phosphate
  modified_base 9: mod_base = OTHER; note = 2'-O-methyluridine-3'-phosphate
  modified_base 10: mod_base = OTHER; note = 2'-fluoroadenosine-3'-phosphate
  modified_base 11: mod_base = OTHER; note = 2'-O-methyladenosine-3'-phosphate
  modified_base 12: mod_base = OTHER; note = 2'-fluoroadenosine-3'-phosphate
  modified_base 13: mod_base = OTHER; note = 2'-O-methyluridine-3'-phosphate
  modified_base 14: mod_base = OTHER; note = 2'-fluoroadenosine-3'-phosphate
  modified_base 15: mod_base = OTHER; note = 2'-O-methylcytidine-3'-phosphate
  modified_base 16: mod_base = OTHER; note = 2'-fluorocytidine-3'-phosphate
  modified_base 17: mod_base = OTHER; note = 2'-O-methylguanosine-3'-phosphate
  modified_base 18: mod_base = OTHER; note = 2'-fluoroadenosine-3'-phosphate
  modified_base 19: mod_base = OTHER; note = 2'-O-methylguanosine-3'-phosphorothioate
  modified_base 20: mod_base = OTHER; note = 2'-O-methylguanosine-3'-phosphorothioate
  modified_base 21: mod_base = OTHER; note = 2'-O-methyladenosine
acagacaataaataccgagga

SEQ ID NO: 1224 - RNA, 21 nt, synthetic construct
  source 1..21: mol_type = other RNA
  modified_base 1: mod_base = OTHER; note = 5'-phosphate-2'-O-methyladenosine-3'-phosphorothioate
  modified_base 2: mod_base = OTHER; note = 2'-fluoroadenosine-3'-phosphorothioate
  modified_base 3: mod_base = OTHER; note = 2'-O-methylcytidine-3'-phosphate
  modified_base 4: mod_base = OTHER; note = 2'-fluoroadenosine-3'-phosphate
  modified_base 5: mod_base = OTHER; note = 2'-O-methylguanosine-3'-phosphate
  modified_base 6: mod_base = OTHER; note = 2'-fluoroadenosine-3'-phosphate
  modified_base 7: mod_base = OTHER; note = 2'-O-methylcytidine-3'-phosphate
  modified_base 8: mod_base = OTHER; note = 2'-fluoroadenosine-3'-phosphate
  modified_base 9: mod_base = OTHER; note = 2'-O-methyladenosine-3'-phosphate
  modified_base 10: mod_base = OTHER; note = 2'-fluorouridine-3'-phosphate
  modified_base 11: mod_base = OTHER; note = 2'-O-methyladenosine-3'-phosphate
  modified_base 12: mod_base = OTHER; note = 2'-fluoroadenosine-3'-phosphate
  modified_base 13: mod_base = OTHER; note = 2'-O-methyladenosine-3'-phosphate
  modified_base 14: mod_base = OTHER; note = 2'-fluorouridine-3'-phosphate
  modified_base 15: mod_base = OTHER; note = 2'-O-methyladenosine-3'-phosphate
  modified_base 16: mod_base = OTHER; note = 2'-fluorocytidine-3'-phosphate
  modified_base 17: mod_base = OTHER; note = 2'-O-methylcytidine-3'-phosphate
  modified_base 18: mod_base = OTHER; note = 2'-fluoroguanosine-3'-phosphate
  modified_base 19: mod_base = OTHER; note = 2'-O-methyladenosine-3'-phosphorothioate
  modified_base 20: mod_base = OTHER; note = 2'-O-methylguanosine-3'-phosphorothioate
  modified_base 21: mod_base = OTHER; note = 2'-O-methylguanosine
aacagacaataaataccgagg

SEQ ID NO: 1225 - RNA, 21 nt, synthetic construct
  source 1..21: mol_type = other RNA
  modified_base 1: mod_base = OTHER; note = 5'-phosphate-2'-O-methyladenosine-3'-phosphorothioate
  modified_base 2: mod_base = OTHER; note = 2'-fluoroguanosine-3'-phosphorothioate
  modified_base 3: mod_base = OTHER; note = 2'-O-methyladenosine-3'-phosphate
  modified_base 4: mod_base = OTHER; note = 2'-fluorocytidine-3'-phosphate
  modified_base 5: mod_base = OTHER; note = 2'-O-methyladenosine-3'-phosphate
  modified_base 6: mod_base = OTHER; note = 2'-fluoroguanosine-3'-phosphate
  modified_base 7: mod_base = OTHER; note = 2'-O-methyladenosine-3'-phosphate
  modified_base 8: mod_base = OTHER; note = 2'-fluorocytidine-3'-phosphate
  modified_base 9: mod_base = OTHER; note = 2'-O-methyladenosine-3'-phosphate
  modified_base 10: mod_base = OTHER; note = 2'-fluoroadenosine-3'-phosphate
  modified_base 11: mod_base = OTHER; note = 2'-O-methyluridine-3'-phosphate
  modified_base 12: mod_base = OTHER; note = 2'-fluoroadenosine-3'-phosphate
  modified_base 13: mod_base = OTHER; note = 2'-O-methyladenosine-3'-phosphate
  modified_base 14: mod_base = OTHER; note = 2'-fluoroadenosine-3'-phosphate
  modified_base 15: mod_base = OTHER; note = 2'-O-methyluridine-3'-phosphate
  modified_base 16: mod_base = OTHER; note = 2'-fluoroadenosine-3'-phosphate
  modified_base 17: mod_base = OTHER; note = 2'-O-methylcytidine-3'-phosphate
  modified_base 18: mod_base = OTHER; note = 2'-fluorocytidine-3'-phosphate
  modified_base 19: mod_base = OTHER; note = 2'-O-methylguanosine-3'-phosphorothioate
  modified_base 20: mod_base = OTHER; note = 2'-O-methyladenosine-3'-phosphorothioate
  modified_base 21: mod_base = OTHER; note = 2'-O-methylguanosine
agacagacaataaataccgag

SEQ ID NO: 1226 - RNA, 21 nt, synthetic construct
  source 1..21: mol_type = other RNA
  modified_base 1: mod_base = OTHER; note = 5'-phosphate-2'-O-methyluridine-3'-phosphorothioate
  modified_base 2: mod_base = OTHER; note = 2'-fluorouridine-3'-phosphorothioate
  modified_base 3: mod_base = OTHER; note = 2'-O-methyladenosine-3'-phosphate
  modified_base 4: mod_base = OTHER; note = 2'-fluoroadenosine-3'-phosphate
  modified_base 5: mod_base = OTHER; note = 2'-O-methylguanosine-3'-phosphate
  modified_base 6: mod_base = OTHER; note = 2'-fluorocytidine-3'-phosphate
  modified_base 7: mod_base = OTHER; note = 2'-O-methylcytidine-3'-phosphate
  modified_base 8: mod_base = OTHER; note = 2'-fluorouridine-3'-phosphate
  modified_base 9: mod_base = OTHER; note = 2'-O-methylcytidine-3'-phosphate
  modified_base 10: mod_base = OTHER; note = 2'-fluoroadenosine-3'-phosphate
  modified_base 11: mod_base = OTHER; note = 2'-O-methylcytidine-3'-phosphate
  modified_base 12: mod_base = OTHER; note = 2'-fluorocytidine-3'-phosphate
  modified_base 13: mod_base = OTHER; note = 2'-O-methyladenosine-3'-phosphate
  modified_base 14: mod_base = OTHER; note = 2'-fluorocytidine-3'-phosphate
  modified_base 15: mod_base = OTHER; note = 2'-O-methylguanosine-3'-phosphate
  modified_base 16: mod_base = OTHER; note = 2'-fluoroadenosine-3'-phosphate
  modified_base 17: mod_base = OTHER; note = 2'-O-methyluridine-3'-phosphate
  modified_base 18: mod_base = OTHER; note = 2'-fluoroguanosine-3'-phosphate
  modified_base 19: mod_base = OTHER; note = 2'-O-methylguanosine-3'-phosphorothioate
  modified_base 20: mod_base = OTHER; note = 2'-O-methylguanosine-3'-phosphorothioate
  modified_base 21: mod_base = OTHER; note = 2'-O-methylcytidine
ttaagcctcaccacgatgggc

SEQ ID NO: 1227 - RNA, 21 nt, synthetic construct
  source 1..21: mol_type = other RNA
  modified_base 1: mod_base = OTHER; note = 5'-phosphate-2'-O-methyladenosine-3'-phosphorothioate
  modified_base 2: mod_base = OTHER; note = 2'-fluorouridine-3'-phosphorothioate
  modified_base 3: mod_base = OTHER; note = 2'-O-methyluridine-3'-phosphate
  modified_base 4: mod_base = OTHER; note = 2'-fluoroadenosine-3'-phosphate
  modified_base 5: mod_base = OTHER; note = 2'-O-methyladenosine-3'-phosphate
  modified_base 6: mod_base = OTHER; note = 2'-fluoroguanosine-3'-phosphate
  modified_base 7: mod_base = OTHER; note = 2'-O-methylcytidine-3'-phosphate
  modified_base 8: mod_base = OTHER; note = 2'-fluorocytidine-3'-phosphate
  modified_base 9: mod_base = OTHER; note = 2'-O-methyluridine-3'-phosphate
  modified_base 10: mod_base = OTHER; note = 2'-fluorocytidine-3'-phosphate
  modified_base 11: mod_base = OTHER; note = 2'-O-methyladenosine-3'-phosphate
  modified_base 12: mod_base = OTHER; note = 2'-fluorocytidine-3'-phosphate
  modified_base 13: mod_base = OTHER; note = 2'-O-methylcytidine-3'-phosphate
  modified_base 14: mod_base = OTHER; note = 2'-fluoroadenosine-3'-phosphate
  modified_base 15: mod_base = OTHER; note = 2'-O-methylcytidine-3'-phosphate
  modified_base 16: mod_base = OTHER; note = 2'-fluoroguanosine-3'-phosphate
  modified_base 17: mod_base = OTHER; note = 2'-O-methyladenosine-3'-phosphate
  modified_base 18: mod_base = OTHER; note = 2'-fluorouridine-3'-phosphate
  modified_base 19: mod_base = OTHER; note = 2'-O-methylguanosine-3'-phosphorothioate
  modified_base 20: mod_base = OTHER; note = 2'-O-methylguanosine-3'-phosphorothioate
  modified_base 21: mod_base = OTHER; note = 2'-O-methylguanosine
attaagcctcaccacgatggg

SEQ ID NO: 1228 - RNA, 21 nt, synthetic construct
  source 1..21: mol_type = other RNA
  modified_base 1: mod_base = OTHER; note = 5'-phosphate-2'-O-methyladenosine-3'-phosphorothioate
  modified_base 2: mod_base = OTHER; note = 2'-fluoroadenosine-3'-phosphorothioate
  modified_base 3: mod_base = OTHER; note = 2'-O-methylguanosine-3'-phosphate
  modified_base 4: mod_base = OTHER; note = 2'-fluoroadenosine-3'-phosphate
  modified_base 5: mod_base = OTHER; note = 2'-O-methyladenosine-3'-phosphate
  modified_base 6: mod_base = OTHER; note = 2'-fluorouridine-3'-phosphate
  modified_base 7: mod_base = OTHER; note = 2'-O-methylcytidine-3'-phosphate
  modified_base 8: mod_base = OTHER; note = 2'-fluorouridine-3'-phosphate
  modified_base 9: mod_base = OTHER; note = 2'-O-methylcytidine-3'-phosphate
  modified_base 10: mod_base = OTHER; note = 2'-fluoroguanosine-3'-phosphate
  modified_base 11: mod_base = OTHER; note = 2'-O-methyladenosine-3'-phosphate
  modified_base 12: mod_base = OTHER; note = 2'-fluoroadenosine-3'-phosphate
  modified_base 13: mod_base = OTHER; note = 2'-O-methylguanosine-3'-phosphate
  modified_base 14: mod_base = OTHER; note = 2'-fluorouridine-3'-phosphate
  modified_base 15: mod_base = OTHER; note = 2'-O-methylcytidine-3'-phosphate
  modified_base 16: mod_base = OTHER; note = 2'-fluoroguanosine-3'-phosphate
  modified_base 17: mod_base = OTHER; note = 2'-O-methyluridine-3'-phosphate
  modified_base 18: mod_base = OTHER; note = 2'-fluorocytidine-3'-phosphate
  modified_base 19: mod_base = OTHER; note = 2'-O-methylcytidine-3'-phosphorothioate
  modified_base 20: mod_base = OTHER; note = 2'-O-methylcytidine-3'-phosphorothioate
  modified_base 21: mod_base = OTHER; note = 2'-O-methyluridine
aagaatctcgaagtcgtccct

SEQ ID NO: 1229 - RNA, 21 nt, synthetic construct
  source 1..21: mol_type = other RNA
  modified_base 1: mod_base = OTHER; note = 5'-phosphate-2'-O-methyluridine-3'-phosphorothioate
  modified_base 2: mod_base = OTHER; note = 2'-fluoroadenosine-3'-phosphorothioate
  modified_base 3: mod_base = OTHER; note = 2'-O-methylcytidine-3'-phosphate
  modified_base 4: mod_base = OTHER; note = 2'-fluoroadenosine-3'-phosphate
  modified_base 5: mod_base = OTHER; note = 2'-O-methylcytidine-3'-phosphate
  modified_base 6: mod_base = OTHER; note = 2'-fluorocytidine-3'-phosphate
  modified_base 7: mod_base = OTHER; note = 2'-O-methyluridine-3'-phosphate
  modified_base 8: mod_base = OTHER; note = 2'-fluoroguanosine-3'-phosphate
  modified_base 9: mod_base = OTHER; note = 2'-O-methylguanosine-3'-phosphate
  modified_base 10: mod_base = OTHER; note = 2'-fluorocytidine-3'-phosphate
  modified_base 11: mod_base = OTHER; note = 2'-O-methylcytidine-3'-phosphate
  modified_base 12: mod_base = OTHER; note = 2'-fluorocytidine-3'-phosphate
  modified_base 13: mod_base = OTHER; note = 2'-O-methylguanosine-3'-phosphate
  modified_base 14: mod_base = OTHER; note = 2'-fluorouridine-3'-phosphate
  modified_base 15: mod_base = OTHER; note = 2'-O-methylcytidine-3'-phosphate
  modified_base 16: mod_base = OTHER; note = 2'-fluorouridine-3'-phosphate
  modified_base 17: mod_base = OTHER; note = 2'-O-methylguanosine-3'-phosphate
  modified_base 18: mod_base = OTHER; note = 2'-fluorocytidine-3'-phosphate
  modified_base 19: mod_base = OTHER; note = 2'-O-methyluridine-3'-phosphorothioate
  modified_base 20: mod_base = OTHER; note = 2'-O-methyluridine-3'-phosphorothioate
  modified_base 21: mod_base = OTHER; note = 2'-O-methylcytidine
tacacctggcccgtctgcttc

SEQ ID NO: 1230 - RNA, 21 nt, synthetic construct
  source 1..21: mol_type = other RNA
  modified_base 1: mod_base = OTHER; note = 5'-phosphate-2'-O-methyladenosine-3'-phosphorothioate
  modified_base 2: mod_base = OTHER; note = 2'-fluorouridine-3'-phosphorothioate
  modified_base 3: mod_base = OTHER; note = 2'-O-methyluridine-3'-phosphate
  modified_base 4: mod_base = OTHER; note = 2'-fluoroguanosine-3'-phosphate
  modified_base 5: mod_base = OTHER; note = 2'-O-methyluridine-3'-phosphate
  modified_base 6: mod_base = OTHER; note = 2'-fluorouridine-3'-phosphate
  modified_base 7: mod_base = OTHER; note = 2'-O-methylcytidine-3'-phosphate
  modified_base 8: mod_base = OTHER; note = 2'-fluoroadenosine-3'-phosphate
  modified_base 9: mod_base = OTHER; note = 2'-O-methyluridine-3'-phosphate
  modified_base 10: mod_base = OTHER; note = 2'-fluoroguanosine-3'-phosphate
  modified_base 11: mod_base = OTHER; note = 2'-O-methyladenosine-3'-phosphate
  modified_base 12: mod_base = OTHER; note = 2'-fluorouridine-3'-phosphate
  modified_base 13: mod_base = OTHER; note = 2'-O-methylcytidine-3'-phosphate
  modified_base 14: mod_base = OTHER; note = 2'-fluorouridine-3'-phosphate
  modified_base 15: mod_base = OTHER; note = 2'-O-methyluridine-3'-phosphate
  modified_base 16: mod_base = OTHER; note = 2'-fluorocytidine-3'-phosphate
  modified_base 17: mod_base = OTHER; note = 2'-O-methyladenosine-3'-phosphate
  modified_base 18: mod_base = OTHER; note = 2'-fluorouridine-3'-phosphate
  modified_base 19: mod_base = OTHER; note = 2'-O-methylguanosine-3'-phosphorothioate
  modified_base 20: mod_base = OTHER; note = 2'-O-methylguanosine-3'-phosphorothioate
  modified_base 21: mod_base = OTHER; note = 2'-O-methylcytidine
attgttcatgatcttcatggc

SEQ ID NO: 1231 - RNA, 21 nt, synthetic construct
  source 1..21: mol_type = other RNA
  modified_base 1: mod_base = OTHER; note = 5'-phosphate-2'-O-methyladenosine-3'-phosphorothioate
  modified_base 2: mod_base = OTHER; note = 2'-fluoroadenosine-3'-phosphorothioate
  modified_base 3: mod_base = OTHER; note = 2'-O-methylcytidine-3'-phosphate
  modified_base 4: mod_base = OTHER; note = 2'-fluorouridine-3'-phosphate
  modified_base 5: mod_base = OTHER; note = 2'-O-methyluridine-3'-phosphate
  modified_base 6: mod_base = OTHER; note = 2'-fluoroguanosine-3'-phosphate
  modified_base 7: mod_base = OTHER; note = 2'-O-methyluridine-3'-phosphate
  modified_base 8: mod_base = OTHER; note = 2'-fluorouridine-3'-phosphate
  modified_base 9: mod_base = OTHER; note = 2'-O-methylcytidine-3'-phosphate
  modified_base 10: mod_base = OTHER; note = 2'-fluoroadenosine-3'-phosphate
  modified_base 11: mod_base = OTHER; note = 2'-O-methyluridine-3'-phosphate
  modified_base 12: mod_base = OTHER; note = 2'-fluoroguanosine-3'-phosphate
  modified_base 13: mod_base = OTHER; note = 2'-O-methyladenosine-3'-phosphate
  modified_base 14: mod_base = OTHER; note = 2'-fluorouridine-3'-phosphate
  modified_base 15: mod_base = OTHER; note = 2'-O-methylcytidine-3'-phosphate
  modified_base 16: mod_base = OTHER; note = 2'-fluorouridine-3'-phosphate
  modified_base 17: mod_base = OTHER; note = 2'-O-methyluridine-3'-phosphate
  modified_base 18: mod_base = OTHER; note = 2'-fluorocytidine-3'-phosphate
  modified_base 19: mod_base = OTHER; note = 2'-O-methyladenosine-3'-phosphorothioate
  modified_base 20: mod_base = OTHER; note = 2'-O-methyluridine-3'-phosphorothioate
  modified_base 21: mod_base = OTHER; note = 2'-O-methylguanosine
aacttgttcatgatcttcatg

SEQ ID NO: 1232 - RNA, 21 nt, synthetic construct
  source 1..21: mol_type = other RNA
  modified_base 1: mod_base = OTHER; note = 5'-phosphate-2'-O-methyladenosine-3'-phosphorothioate
  modified_base 2: mod_base = OTHER; note = 2'-fluoroadenosine-3'-phosphorothioate
  modified_base 3: mod_base = OTHER; note = 2'-O-methylcytidine-3'-phosphate
  modified_base 4: mod_base = OTHER; note = 2'-fluoroguanosine-3'-phosphate
  modified_base 5: mod_base = OTHER; note = 2'-O-methylguanosine-3'-phosphate
  modified_base 6: mod_base = OTHER; note = 2'-fluoroadenosine-3'-phosphate
  modified_base 7: mod_base = OTHER; note = 2'-O-methyladenosine-3'-phosphate
  modified_base 8: mod_base = OTHER; note = 2'-fluoroguanosine-3'-phosphate
  modified_base 9: mod_base = OTHER; note = 2'-O-methylcytidine-3'-phosphate
  modified_base 10: mod_base = OTHER; note = 2'-fluoroadenosine-3'-phosphate
  modified_base 11: mod_base = OTHER; note = 2'-O-methylcytidine-3'-phosphate
  modified_base 12: mod_base = OTHER; note = 2'-fluoroguanosine-3'-phosphate
  modified_base 13: mod_base = OTHER; note = 2'-O-methyladenosine-3'-phosphate
  modified_base 14: mod_base = OTHER; note = 2'-fluorocytidine-3'-phosphate
  modified_base 15: mod_base = OTHER; note = 2'-O-methyladenosine-3'-phosphate
  modified_base 16: mod_base = OTHER; note = 2'-fluorocytidine-3'-phosphate
  modified_base 17: mod_base = OTHER; note = 2'-O-methylcytidine-3'-phosphate
  modified_base 18: mod_base = OTHER; note = 2'-fluorouridine-3'-phosphate
  modified_base 19: mod_base = OTHER; note = 2'-O-methylcytidine-3'-phosphorothioate
  modified_base 20: mod_base = OTHER; note = 2'-O-methylguanosine-3'-phosphorothioate
  modified_base 21: mod_base = OTHER; note = 2'-O-methylcytidine
aacggaagcacgacacctcgc

SEQ ID NO: 1233 - RNA, 21 nt, synthetic construct
  source 1..21: mol_type = other RNA
  modified_base 1: mod_base = OTHER; note = 5'-phosphate-2'-O-methyladenosine-3'-phosphorothioate
  modified_base 2: mod_base = OTHER; note = 2'-fluorouridine-3'-phosphorothioate
  modified_base 3: mod_base = OTHER; note = 2'-O-methyluridine-3'-phosphate
  modified_base 4: mod_base = OTHER; note = 2'-fluorocytidine-3'-phosphate
  modified_base 5: mod_base = OTHER; note = 2'-O-methyladenosine-3'-phosphate
  modified_base 6: mod_base = OTHER; note = 2'-fluorocytidine-3'-phosphate
  modified_base 7: mod_base = OTHER; note = 2'-O-methylcytidine-3'-phosphate
  modified_base 8: mod_base = OTHER; note = 2'-fluoroadenosine-3'-phosphate
  modified_base 9: mod_base = OTHER; note = 2'-O-methyladenosine-3'-phosphate
  modified_base 10: mod_base = OTHER; note = 2'-fluorocytidine-3'-phosphate
  modified_base 11: mod_base = OTHER; note = 2'-O-methyladenosine-3'-phosphate
  modified_base 12: mod_base = OTHER; note = 2'-fluorocytidine-3'-phosphate
  modified_base 13: mod_base = OTHER; note = 2'-O-methylguanosine-3'-phosphate
  modified_base 14: mod_base = OTHER; note = 2'-fluorouridine-3'-phosphate
  modified_base 15: mod_base = OTHER; note = 2'-O-methylcytidine-3'-phosphate
  modified_base 16: mod_base = OTHER; note = 2'-fluorocytidine-3'-phosphate
  modified_base 17: mod_base = OTHER; note = 2'-O-methylcytidine-3'-phosphate
  modified_base 18: mod_base = OTHER; note = 2'-fluorouridine-3'-phosphate
  modified_base 19: mod_base = OTHER; note = 2'-O-methylcytidine-3'-phosphorothioate
  modified_base 20: mod_base = OTHER; note = 2'-O-methyluridine-3'-phosphorothioate
  modified_base 21: mod_base = OTHER; note = 2'-O-methylcytidine
attcaccaacacgtccctctc

SEQ ID NO: 1234 - RNA, 21 nt, synthetic construct
  source 1..21: mol_type = other RNA
  modified_base 1: mod_base = OTHER; note = 5'-phosphate-2'-O-methyladenosine-3'-phosphorothioate
  modified_base 2: mod_base = OTHER; note = 2'-fluoroadenosine-3'-phosphorothioate
  modified_base 3: mod_base = OTHER; note = 2'-O-methylcytidine-3'-phosphate
  modified_base 4: mod_base = OTHER; note = 2'-fluoroguanosine-3'-phosphate
  modified_base 5: mod_base = OTHER; note = 2'-O-methyluridine-3'-phosphate
  modified_base 6: mod_base = OTHER; note = 2'-fluoroadenosine-3'-phosphate
  modified_base 7: mod_base = OTHER; note = 2'-O-methyladenosine-3'-phosphate
  modified_base 8: mod_base = OTHER; note = 2'-fluorouridine-3'-phosphate
  modified_base 9: mod_base = OTHER; note = 2'-O-methyladenosine-3'-phosphate
  modified_base 10: mod_base = OTHER; note = 2'-fluorocytidine-3'-phosphate
  modified_base 11: mod_base = OTHER; note = 2'-O-methyluridine-3'-phosphate
  modified_base 12: mod_base = OTHER; note = 2'-fluorocytidine-3'-phosphate
  modified_base 13: mod_base = OTHER; note = 2'-O-methylcytidine-3'-phosphate
  modified_base 14: mod_base = OTHER; note = 2'-fluoroadenosine-3'-phosphate
  modified_base 15: mod_base = OTHER; note = 2'-O-methyluridine-3'-phosphate
  modified_base 16: mod_base = OTHER; note = 2'-fluoroguanosine-3'-phosphate
  modified_base 17: mod_base = OTHER; note = 2'-O-methyladenosine-3'-phosphate
  modified_base 18: mod_base = OTHER; note = 2'-fluorocytidine-3'-phosphate
  modified_base 19: mod_base = OTHER; note = 2'-O-methylcytidine-3'-phosphorothioate
  modified_base 20: mod_base = OTHER; note = 2'-O-methyladenosine-3'-phosphorothioate
  modified_base 21: mod_base = OTHER; note = 2'-O-methylguanosine
aacgtaatactccatgaccag

SEQ ID NO: 1235 - RNA, 21 nt, synthetic construct
  source 1..21: mol_type = other RNA
  modified_base 1: mod_base = OTHER; note = 5'-phosphate-2'-O-methyladenosine-3'-phosphorothioate
  modified_base 2: mod_base = OTHER; note = 2'-fluoroguanosine-3'-phosphorothioate
  modified_base 3: mod_base = OTHER; note = 2'-O-methyladenosine-3'-phosphate
  modified_base 4: mod_base = OTHER; note = 2'-fluoroadenosine-3'-phosphate
  modified_base 5: mod_base = OTHER; note = 2'-O-methylcytidine-3'-phosphate
  modified_base 6: mod_base = OTHER; note = 2'-fluoroadenosine-3'-phosphate
  modified_base 7: mod_base = OTHER; note = 2'-O-methyluridine-3'-phosphate
  modified_base 8: mod_base = OTHER; note = 2'-fluorouridine-3'-phosphate
  modified_base 9: mod_base = OTHER; note = 2'-O-methyluridine-3'-phosphate
  modified_base 10: mod_base = OTHER; note = 2'-fluorocytidine-3'-phosphate
  modified_base 11: mod_base = OTHER; note = 2'-O-methyladenosine-3'-phosphate
  modified_base 12: mod_base = OTHER; note = 2'-fluorouridine-3'-phosphate
  modified_base 13: mod_base = OTHER; note = 2'-O-methyladenosine-3'-phosphate
  modified_base 14: mod_base = OTHER; note = 2'-fluoroguanosine-3'-phosphate
  modified_base 15: mod_base = OTHER; note = 2'-O-methylguanosine-3'-phosphate
  modified_base 16: mod_base = OTHER; note = 2'-fluorocytidine-3'-phosphate
  modified_base 17: mod_base = OTHER; note = 2'-O-methylguanosine-3'-phosphate
  modified_base 18: mod_base = OTHER; note = 2'-fluoroadenosine-3'-phosphate
  modified_base 19: mod_base = OTHER; note = 2'-O-methyladenosine-3'-phosphorothioate
  modified_base 20: mod_base = OTHER; note = 2'-O-methyluridine-3'-phosphorothioate
  modified_base 21: mod_base = OTHER; note = 2'-O-methyladenosine
agaacatttcataggcgaata

SEQ ID NO: 1236 - RNA, 21 nt, synthetic construct
  source 1..21: mol_type = other RNA
  modified_base 1: mod_base = OTHER; note = 5'-phosphate-2'-O-methyluridine-3'-phosphorothioate
  modified_base 2: mod_base = OTHER; note = 2'-fluoroadenosine-3'-phosphorothioate
  modified_base 3: mod_base = OTHER; note = 2'-O-methylguanosine-3'-phosphate
  modified_base 4: mod_base = OTHER; note = 2'-fluoroadenosine-3'-phosphate
  modified_base 5: mod_base = OTHER; note = 2'-O-methyladenosine-3'-phosphate
  modified_base 6: mod_base = OTHER; note = 2'-fluorocytidine-3'-phosphate
  modified_base 7: mod_base = OTHER; note = 2'-O-methyladenosine-3'-phosphate
  modified_base 8: mod_base = OTHER; note = 2'-fluorouridine-3'-phosphate
  modified_base 9: mod_base = OTHER; note = 2'-O-methyluridine-3'-phosphate
  modified_base 10: mod_base = OTHER; note = 2'-fluorouridine-3'-phosphate
  modified_base 11: mod_base = OTHER; note = 2'-O-methylcytidine-3'-phosphate
  modified_base 12: mod_base = OTHER; note = 2'-fluoroadenosine-3'-phosphate
  modified_base 13: mod_base = OTHER; note = 2'-O-methyluridine-3'-phosphate
  modified_base 14: mod_base = OTHER; note = 2'-fluoroadenosine-3'-phosphate
  modified_base 15: mod_base = OTHER; note = 2'-O-methylguanosine-3'-phosphate
  modified_base 16: mod_base = OTHER; note = 2'-fluoroguanosine-3'-phosphate
  modified_base 17: mod_base = OTHER; note = 2'-O-methylcytidine-3'-phosphate
  modified_base 18: mod_base = OTHER; note = 2'-fluoroguanosine-3'-phosphate
  modified_base 19: mod_base = OTHER; note = 2'-O-methyladenosine-3'-phosphorothioate
  modified_base 20: mod_base = OTHER; note = 2'-O-methyladenosine-3'-phosphorothioate
  modified_base 21: mod_base = OTHER; note = 2'-O-methyluridine
tagaacatttcataggcgaat

SEQ ID NO: 1237 - RNA, 21 nt, synthetic construct
  source 1..21: mol_type = other RNA
  modified_base 1: mod_base = OTHER; note = 5'-phosphate-2'-O-methyladenosine-3'-phosphorothioate
  modified_base 2: mod_base = OTHER; note = 2'-fluoroguanosine-3'-phosphorothioate
  modified_base 3: mod_base = OTHER; note = 2'-O-methyluridine-3'-phosphate
  modified_base 4: mod_base = OTHER; note = 2'-fluoroadenosine-3'-phosphate
  modified_base 5: mod_base = OTHER; note = 2'-O-methylguanosine-3'-phosphate
  modified_base 6: mod_base = OTHER; note = 2'-fluoroadenosine-3'-phosphate
  modified_base 7: mod_base = OTHER; note = 2'-O-methyladenosine-3'-phosphate
  modified_base 8: mod_base = OTHER; note = 2'-fluoroguanosine-3'-phosphate
  modified_base 9: mod_base = OTHER; note = 2'-O-methylguanosine-3'-phosphate
  modified_base 10: mod_base = OTHER; note = 2'-fluoroguanosine-3'-phosphate
  modified_base 11: mod_base = OTHER; note = 2'-O-methylcytidine-3'-phosphate
  modified_base 12: mod_base = OTHER; note = 2'-fluoroguanosine-3'-phosphate
  modified_base 13: mod_base = OTHER; note = 2'-O-methyluridine-3'-phosphate
  modified_base 14: mod_base = OTHER; note = 2'-fluorocytidine-3'-phosphate
  modified_base 15: mod_base = OTHER; note = 2'-O-methyluridine-3'-phosphate
  modified_base 16: mod_base = OTHER; note = 2'-fluoroguanosine-3'-phosphate
  modified_base 17: mod_base = OTHER; note = 2'-O-methylcytidine-3'-phosphate
  modified_base 18: mod_base = OTHER; note = 2'-fluorocytidine-3'-phosphate
  modified_base 19: mod_base = OTHER; note = 2'-O-methylcytidine-3'-phosphorothioate
  modified_base 20: mod_base = OTHER; note = 2'-O-methyladenosine-3'-phosphorothioate
  modified_base 21: mod_base = OTHER; note = 2'-O-methyluridine
agtagaagggcgtctgcccat

SEQ ID NO: 1238 - RNA, 21 nt, synthetic construct
  source 1..21: mol_type = other RNA
  modified_base 1: mod_base = OTHER; note = 5'-phosphate-2'-O-methyladenosine-3'-phosphorothioate
  modified_base 2: mod_base = OTHER; note = 2'-fluoroadenosine-3'-phosphorothioate
  modified_base 3: mod_base = OTHER; note = 2'-O-methyladenosine-3'-phosphate
  modified_base 4: mod_base = OTHER; note = 2'-fluorouridine-3'-phosphate
  modified_base 5: mod_base = OTHER; note = 2'-O-methylcytidine-3'-phosphate
  modified_base 6: mod_base = OTHER; note = 2'-fluorocytidine-3'-phosphate
  modified_base 7: mod_base = OTHER; note = 2'-O-methylguanosine-3'-phosphate
  modified_base 8: mod_base = OTHER; note = 2'-fluorocytidine-3'-phosphate
  modified_base 9: mod_base = OTHER; note = 2'-O-methylguanosine-3'-phosphate
  modified_base 10: mod_base = OTHER; note = 2'-fluorouridine-3'-phosphate
  modified_base 11: mod_base = OTHER; note = 2'-O-methyladenosine-3'-phosphate
  modified_base 12: mod_base = OTHER; note = 2'-fluoroguanosine-3'-phosphate
  modified_base 13: mod_base = OTHER; note = 2'-O-methyladenosine-3'-phosphate
  modified_base 14: mod_base = OTHER; note = 2'-fluoroadenosine-3'-phosphate
  modified_base 15: mod_base = OTHER; note = 2'-O-methylguanosine-3'-phosphate
  modified_base 16: mod_base = OTHER; note = 2'-fluoroguanosine-3'-phosphate
  modified_base 17: mod_base = OTHER; note = 2'-O-methylguanosine-3'-phosphate
  modified_base 18: mod_base = OTHER; note = 2'-fluorocytidine-3'-phosphate
  modified_base 19: mod_base = OTHER; note = 2'-O-methylguanosine-3'-phosphorothioate
  modified_base 20: mod_base = OTHER; note = 2'-O-methyluridine-3'-phosphorothioate
  modified_base 21: mod_base = OTHER; note = 2'-O-methylcytidine
aaatccgcgtagaagggcgtc

SEQ ID NO: 1239 - RNA, 21 nt, synthetic construct
  source 1..21: mol_type = other RNA
  modified_base 1: mod_base = OTHER; note = 5'-phosphate-2'-O-methyladenosine-3'-phosphorothioate
  modified_base 2: mod_base = OTHER; note = 2'-fluorouridine-3'-phosphorothioate
  modified_base 3: mod_base = OTHER; note = 2'-O-methylguanosine-3'-phosphate
  modified_base 4: mod_base = OTHER; note = 2'-fluoroguanosine-3'-phosphate
  modified_base 5: mod_base = OTHER; note = 2'-O-methyladenosine-3'-phosphate
  modified_base 6: mod_base = OTHER; note = 2'-fluoroadenosine-3'-phosphate
  modified_base 7: mod_base = OTHER; note = 2'-O-methyluridine-3'-phosphate
  modified_base 8: mod_base = OTHER; note = 2'-fluorocytidine-3'-phosphate
  modified_base 9: mod_base = OTHER; note = 2'-O-methylcytidine-3'-phosphate
  modified_base 10: mod_base = OTHER; note = 2'-fluoroguanosine-3'-phosphate
  modified_base 11: mod_base = OTHER; note = 2'-O-methylcytidine-3'-phosphate
  modified_base 12: mod_base = OTHER; note = 2'-fluoroguanosine-3'-phosphate
  modified_base 13: mod_base = OTHER; note = 2'-O-methyluridine-3'-phosphate
  modified_base 14: mod_base = OTHER; note = 2'-fluoroadenosine-3'-phosphate
  modified_base 15: mod_base = OTHER; note = 2'-O-methylguanosine-3'-phosphate
  modified_base 16: mod_base = OTHER; note = 2'-fluoroadenosine-3'-phosphate
  modified_base 17: mod_base = OTHER; note = 2'-O-methyladenosine-3'-phosphate
  modified_base 18: mod_base = OTHER; note = 2'-fluoroguanosine-3'-phosphate
  modified_base 19: mod_base = OTHER; note = 2'-O-methylguanosine-3'-phosphorothioate
  modified_base 20: mod_base = OTHER; note = 2'-O-methylguanosine-3'-phosphorothioate
  modified_base 21: mod_base = OTHER; note = 2'-O-methylcytidine
atggaatccgcgtagaagggc

SEQ ID NO: 1240 - RNA, 21 nt, synthetic construct
  source 1..21: mol_type = other RNA
  modified_base 1: mod_base = OTHER; note = 5'-phosphate-2'-O-methylcytidine-3'-phosphorothioate
  modified_base 2: mod_base = OTHER; note = 2'-fluorouridine-3'-phosphorothioate
  modified_base 3: mod_base = OTHER; note = 2'-O-methyluridine-3'-phosphate
  modified_base 4: mod_base = OTHER; note = 2'-fluoroguanosine-3'-phosphate
  modified_base 5: mod_base = OTHER; note = 2'-O-methyluridine-3'-phosphate
  modified_base 6: mod_base = OTHER; note = 2'-fluoroadenosine-3'-phosphate
  modified_base 7: mod_base = OTHER; note = 2'-O-methylguanosine-3'-phosphate
  modified_base 8: mod_base = OTHER; note = 2'-fluorouridine-3'-phosphate
  modified_base 9: mod_base = OTHER; note = 2'-O-methylguanosine-3'-phosphate
  modified_base 10: mod_base = OTHER; note = 2'-fluoroguanosine-3'-phosphate
  modified_base 11: mod_base = OTHER; note = 2'-O-methyladenosine-3'-phosphate
  modified_base 12: mod_base = OTHER; note = 2'-fluorocytidine-3'-phosphate
  modified_base 13: mod_base = OTHER; note = 2'-O-methylguanosine-3'-phosphate
  modified_base 14: mod_base = OTHER; note = 2'-fluoroadenosine-3'-phosphate
  modified_base 15: mod_base = OTHER; note = 2'-O-methyluridine-3'-phosphate
  modified_base 16: mod_base = OTHER; note = 2'-fluorocytidine-3'-phosphate
  modified_base 17: mod_base = OTHER; note = 2'-O-methyluridine-3'-phosphate
  modified_base 18: mod_base = OTHER; note = 2'-fluorouridine-3'-phosphate
  modified_base 19: mod_base = OTHER; note = 2'-O-methylguanosine-3'-phosphorothioate
  modified_base 20: mod_base = OTHER; note = 2'-O-methylcytidine-3'-phosphorothioate
  modified_base 21: mod_base = OTHER; note = 2'-O-methylcytidine
cttgtagtggacgatcttgcc

SEQ ID NO: 1241 - RNA, 21 nt, synthetic construct
  source 1..21: mol_type = other RNA
  modified_base 1: mod_base = OTHER; note = 5'-phosphate-2'-O-methyladenosine-3'-phosphorothioate
  modified_base 2: mod_base = OTHER; note = 2'-fluoroguanosine-3'-phosphorothioate
  modified_base 3: mod_base = OTHER; note = 2'-O-methyladenosine-3'-phosphate
  modified_base 4: mod_base = OTHER; note = 2'-fluoroguanosine-3'-phosphate
  modified_base 5: mod_base = OTHER; note = 2'-O-methyladenosine-3'-phosphate
  modified_base 6: mod_base = OTHER; note = 2'-fluoroguanosine-3'-phosphate
  modified_base 7: mod_base = OTHER; note = 2'-O-methylguanosine-3'-phosphate
  modified_base 8: mod_base = OTHER; note = 2'-fluorouridine-3'-phosphate
  modified_base 9: mod_base = OTHER; note = 2'-O-methylguanosine-3'-phosphate
  modified_base 10: mod_base = OTHER; note = 2'-fluorocytidine-3'-phosphate
  modified_base 11: mod_base = OTHER; note = 2'-O-methyluridine-3'-phosphate
  modified_base 12: mod_base = OTHER; note = 2'-fluorocytidine-3'-phosphate
  modified_base 13: mod_base = OTHER; note = 2'-O-methylcytidine-3'-phosphate
  modified_base 14: mod_base = OTHER; note = 2'-fluorouridine-3'-phosphate
  modified_base 15: mod_base = OTHER; note = 2'-O-methyluridine-3'-phosphate
  modified_base 16: mod_base = OTHER; note = 2'-fluoroguanosine-3'-phosphate
  modified_base 17: mod_base = OTHER; note = 2'-O-methyluridine-3'-phosphate
  modified_base 18: mod_base = OTHER; note = 2'-fluoroadenosine-3'-phosphate
  modified_base 19: mod_base = OTHER; note = 2'-O-methylguanosine-3'-phosphorothioate
  modified_base 20: mod_base = OTHER; note = 2'-O-methyluridine-3'-phosphorothioate
  modified_base 21: mod_base = OTHER; note = 2'-O-methylguanosine
agagaggtgctccttgtagtg

SEQ ID NO: 1242 - RNA, 21 nt, synthetic construct
  source 1..21: mol_type = other RNA
  modified_base 1: mod_base = OTHER; note = 5'-phosphate-2'-O-methyladenosine-3'-phosphorothioate
  modified_base 2: mod_base = OTHER; note = 2'-fluoroadenosine-3'-phosphorothioate
  modified_base 3: mod_base = OTHER; note = 2'-O-methylguanosine-3'-phosphate
  modified_base 4: mod_base = OTHER; note = 2'-fluoroadenosine-3'-phosphate
  modified_base 5: mod_base = OTHER; note = 2'-O-methylguanosine-3'-phosphate
  modified_base 6: mod_base = OTHER; note = 2'-fluoroadenosine-3'-phosphate
  modified_base 7: mod_base = OTHER; note = 2'-O-methylguanosine-3'-phosphate
  modified_base 8: mod_base = OTHER; note = 2'-fluoroadenosine-3'-phosphate
  modified_base 9: mod_base = OTHER; note = 2'-O-methylguanosine-3'-phosphate
  modified_base 10: mod_base = OTHER; note = 2'-fluoroguanosine-3'-phosphate
  modified_base 11: mod_base = OTHER; note = 2'-O-methyluridine-3'-phosphate
  modified_base 12: mod_base = OTHER; note = 2'-fluoroguanosine-3'-phosphate
  modified_base 13: mod_base = OTHER; note = 2'-O-methylcytidine-3'-phosphate
  modified_base 14: mod_base = OTHER; note = 2'-fluorouridine-3'-phosphate
  modified_base 15: mod_base = OTHER; note = 2'-O-methylcytidine-3'-phosphate
  modified_base 16: mod_base = OTHER; note = 2'-fluorocytidine-3'-phosphate
  modified_base 17: mod_base = OTHER; note = 2'-O-methyluridine-3'-phosphate
  modified_base 18: mod_base = OTHER; note = 2'-fluorouridine-3'-phosphate
  modified_base 19: mod_base = OTHER; note = 2'-O-methylguanosine-3'-phosphorothioate
  modified_base 20: mod_base = OTHER; note = 2'-O-methyluridine-3'-phosphorothioate
  modified_base 21: mod_base = OTHER; note = 2'-O-methyladenosine
aagagagaggtgctccttgta

SEQ ID NO: 1243 - RNA, 21 nt, synthetic construct
  source 1..21: mol_type = other RNA
  modified_base 1: mod_base = OTHER; note = 5'-phosphate-2'-O-methyladenosine-3'-phosphorothioate
  modified_base 2: mod_base = OTHER; note = 2'-fluorouridine-3'-phosphorothioate
  modified_base 3: mod_base = OTHER; note = 2'-O-methylcytidine-3'-phosphate
  modified_base 4: mod_base = OTHER; note = 2'-fluoroguanosine-3'-phosphate
  modified_base 5: mod_base = OTHER; note = 2'-O-methyladenosine-3'-phosphate
  modified_base 6: mod_base = OTHER; note = 2'-fluoroguanosine-3'-phosphate
  modified_base 7: mod_base = OTHER; note = 2'-O-methylguanosine-3'-phosphate
  modified_base 8: mod_base = OTHER; note = 2'-fluorocytidine-3'-phosphate
  modified_base 9: mod_base = OTHER; note = 2'-O-methylcytidine-3'-phosphate
  modified_base 10: mod_base = OTHER; note = 2'-fluoroadenosine-3'-phosphate
  modified_base 11: mod_base = OTHER; note = 2'-O-methyladenosine-3'-phosphate
  modified_base 12: mod_base = OTHER; note = 2'-fluoroadenosine-3'-phosphate
  modified_base 13: mod_base = OTHER; note = 2'-O-methylguanosine-3'-phosphate
  modified_base 14: mod_base = OTHER; note = 2'-fluoroadenosine-3'-phosphate
  modified_base 15: mod_base = OTHER; note = 2'-O-methyladenosine-3'-phosphate
  modified_base 16: mod_base = OTHER; note = 2'-fluoroguanosine-3'-phosphate
  modified_base 17: mod_base = OTHER; note = 2'-O-methyladenosine-3'-phosphate
  modified_base 18: mod_base = OTHER; note = 2'-fluoroadenosine-3'-phosphate
  modified_base 19: mod_base = OTHER; note = 2'-O-methylguanosine-3'-phosphorothioate
  modified_base 20: mod_base = OTHER; note = 2'-O-methylguanosine-3'-phosphorothioate
  modified_base 21: mod_base = OTHER; note = 2'-O-methylguanosine
atcgaggccaaagaagaaggg

SEQ ID NO: 1244 - RNA, 21 nt, synthetic construct
  source 1..21: mol_type = other RNA
  modified_base 1: mod_base = OTHER; note = 5'-phosphate-2'-O-methyladenosine-3'-phosphorothioate
  modified_base 2: mod_base = OTHER; note = 2'-fluorouridine-3'-phosphorothioate
  modified_base 3: mod_base = OTHER; note = 2'-O-methylguanosine-3'-phosphate
  modified_base 4: mod_base = OTHER; note = 2'-fluorouridine-3'-phosphate
  modified_base 5: mod_base = OTHER; note = 2'-O-methylcytidine-3'-phosphate
  modified_base 6: mod_base = OTHER; note = 2'-fluoroguanosine-3'-phosphate
  modified_base 7: mod_base = OTHER; note = 2'-O-methylguanosine-3'-phosphate
  modified_base 8: mod_base = OTHER; note = 2'-fluorouridine-3'-phosphate
  modified_base 9: mod_base = OTHER; note = 2'-O-methylguanosine-3'-phosphate
  modified_base 10: mod_base = OTHER; note = 2'-fluoroguanosine-3'-phosphate
  modified_base 11: mod_base = OTHER; note = 2'-O-methylcytidine-3'-phosphate
  modified_base 12: mod_base = OTHER; note = 2'-fluoroadenosine-3'-phosphate
  modified_base 13: mod_base = OTHER; note = 2'-O-methylcytidine-3'-phosphate
  modified_base 14: mod_base = OTHER; note = 2'-fluorocytidine-3'-phosphate
  modified_base 15: mod_base = OTHER; note = 2'-O-methyluridine-3'-phosphate
  modified_base 16: mod_base = OTHER; note = 2'-fluorouridine-3'-phosphate
  modified_base 17: mod_base = OTHER; note = 2'-O-methylcytidine-3'-phosphate
  modified_base 18: mod_base = OTHER; note = 2'-fluoroguanosine-3'-phosphate
  modified_base 19: mod_base = OTHER; note = 2'-O-methyladenosine-3'-phosphorothioate
  modified_base 20: mod_base = OTHER; note = 2'-O-methyladenosine-3'-phosphorothioate
  modified_base 21: mod_base = OTHER; note = 2'-O-methyladenosine
atgtcggtggcaccttcgaaa

SEQ ID NO: 1245 - RNA, 21 nt, synthetic construct
  source 1..21: mol_type = other RNA
  modified_base 1: mod_base = OTHER; note = 5'-phosphate-2'-O-methyladenosine-3'-phosphorothioate
  modified_base 2: mod_base = OTHER; note = 2'-fluoroadenosine-3'-phosphorothioate
  modified_base 3: mod_base = OTHER; note = 2'-O-methylguanosine-3'-phosphate
  modified_base 4: mod_base = OTHER; note = 2'-fluorouridine-3'-phosphate
  modified_base 5: mod_base = OTHER; note = 2'-O-methylcytidine-3'-phosphate
  modified_base 6: mod_base = OTHER; note = 2'-fluoroguanosine-3'-phosphate
  modified_base 7: mod_base = OTHER; note = 2'-O-methyladenosine-3'-phosphate
  modified_base 8: mod_base = OTHER; note = 2'-fluoroadenosine-3'-phosphate
  modified_base 9: mod_base = OTHER; note = 2'-O-methylguanosine-3'-phosphate
  modified_base 10: mod_base = OTHER; note = 2'-fluorouridine-3'-phosphate
  modified_base 11: mod_base = OTHER; note = 2'-O-methyluridine-3'-phosphate
  modified_base 12: mod_base = OTHER; note = 2'-fluoroguanosine-3'-phosphate
  modified_base 13: mod_base = OTHER; note = 2'-O-methylcytidine-3'-phosphate
  modified_base 14: mod_base = OTHER; note = 2'-fluoroadenosine-3'-phosphate
  modified_base 15: mod_base = OTHER; note = 2'-O-methyluridine-3'-phosphate
  modified_base 16: mod_base = OTHER; note = 2'-fluoroguanosine-3'-phosphate
  modified_base 17: mod_base = OTHER; note = 2'-O-methyluridine-3'-phosphate
  modified_base 18: mod_base = OTHER; note = 2'-fluoroguanosine-3'-phosphate
  modified_base 19: mod_base = OTHER; note = 2'-O-methyluridine-3'-phosphorothioate
  modified_base 20: mod_base = OTHER; note = 2'-O-methylcytidine-3'-phosphorothioate
  modified_base 21: mod_base = OTHER; note = 2'-O-methylguanosine
aagtcgaagttgcatgtgtcg

SEQ ID NO: 1246 - RNA, 21 nt, synthetic construct
  source 1..21: mol_type = other RNA
  modified_base 1: mod_base = OTHER; note = 5'-phosphate-2'-O-methyladenosine-3'-phosphorothioate
  modified_base 2: mod_base = OTHER; note = 2'-fluorouridine-3'-phosphorothioate
  modified_base 3: mod_base = OTHER; note = 2'-O-methylcytidine-3'-phosphate
  modified_base 4: mod_base = OTHER; note = 2'-fluorocytidine-3'-phosphate
  modified_base 5: mod_base = OTHER; note = 2'-O-methyladenosine-3'-phosphate
  modified_base 6: mod_base = OTHER; note = 2'-fluorocytidine-3'-phosphate
  modified_base 7: mod_base = OTHER; note = 2'-O-methylcytidine-3'-phosphate
  modified_base 8: mod_base = OTHER; note = 2'-fluoroadenosine-3'-phosphate
  modified_base 9: mod_base = OTHER; note = 2'-O-methyladenosine-3'-phosphate
  modified_base 10: mod_base = OTHER; note = 2'-fluoroguanosine-3'-phosphate
  modified_base 11: mod_base = OTHER; note = 2'-O-methyluridine-3'-phosphate
  modified_base 12: mod_base = OTHER; note = 2'-fluorocytidine-3'-phosphate
  modified_base 13: mod_base = OTHER; note = 2'-O-methylguanosine-3'-phosphate
  modified_base 14: mod_base = OTHER; note = 2'-fluoroadenosine-3'-phosphate
  modified_base 15: mod_base = OTHER; note = 2'-O-methyladenosine-3'-phosphate
  modified_base 16: mod_base = OTHER; note = 2'-fluoroguanosine-3'-phosphate
  modified_base 17: mod_base = OTHER; note = 2'-O-methyluridine-3'-phosphate
  modified_base 18: mod_base = OTHER; note = 2'-fluorouridine-3'-phosphate
  modified_base 19: mod_base = OTHER; note = 2'-O-methylguanosine-3'-phosphorothioate
  modified_base 20: mod_base = OTHER; note = 2'-O-methylcytidine-3'-phosphorothioate
  modified_base 21: mod_base = OTHER; note = 2'-O-methyladenosine
atccaccaagtcgaagttgca

SEQ ID NO: 1247 - RNA, 21 nt, synthetic construct
  source 1..21: mol_type = other RNA
  modified_base 1: mod_base = OTHER; note = 5'-phosphate-2'-O-methyladenosine-3'-phosphorothioate
  modified_base 2: mod_base = OTHER; note = 2'-fluoroadenosine-3'-phosphorothioate
  modified_base 3: mod_base = OTHER; note = 2'-O-methyluridine-3'-phosphate
  modified_base 4: mod_base = OTHER; note = 2'-fluorocytidine-3'-phosphate
  modified_base 5: mod_base = OTHER; note = 2'-O-methylcytidine-3'-phosphate
  modified_base 6: mod_base = OTHER; note = 2'-fluoroguanosine-3'-phosphate
  modified_base 7: mod_base = OTHER; note = 2'-O-methylcytidine-3'-phosphate
  modified_base 8: mod_base = OTHER; note = 2'-fluorouridine-3'-phosphate
  modified_base 9: mod_base = OTHER; note = 2'-O-methylcytidine-3'-phosphate
  modified_base 10: mod_base = OTHER; note = 2'-fluorocytidine-3'-phosphate
  modified_base 11: mod_base = OTHER; note = 2'-O-methyluridine-3'-phosphate
  modified_base 12: mod_base = OTHER; note = 2'-fluoroguanosine-3'-phosphate
  modified_base 13: mod_base = OTHER; note = 2'-O-methylcytidine-3'-phosphate
  modified_base 14: mod_base = OTHER; note = 2'-fluoroadenosine-3'-phosphate
  modified_base 15: mod_base = OTHER; note = 2'-O-methyladenosine-3'-phosphate
  modified_base 16: mod_base = OTHER; note = 2'-fluorocytidine-3'-phosphate
  modified_base 17: mod_base = OTHER; note = 2'-O-methyluridine-3'-phosphate
  modified_base 18: mod_base = OTHER; note = 2'-fluoroguanosine-3'-phosphate
  modified_base 19: mod_base = OTHER; note = 2'-O-methylcytidine-3'-phosphorothioate
  modified_base 20: mod_base = OTHER; note = 2'-O-methylcytidine-3'-phosphorothioate
  modified_base 21: mod_base = OTHER; note = 2'-O-methylguanosine
aatccgctcctgcaactgccg

SEQ ID NO: 1248 - RNA, 21 nt, synthetic construct
  source 1..21: mol_type = other RNA
  modified_base 1: mod_base = OTHER; note = 5'-phosphate-2'-O-methyladenosine-3'-phosphorothioate
  modified_base 2: mod_base = OTHER; note = 2'-fluoroadenosine-3'-phosphorothioate
  modified_base 3: mod_base = OTHER; note = 2'-O-methylcytidine-3'-phosphate
  modified_base 4: mod_base = OTHER; note = 2'-fluorouridine-3'-phosphate
  modified_base 5: mod_base = OTHER; note = 2'-O-methylcytidine-3'-phosphate
  modified_base 6: mod_base = OTHER; note = 2'-fluorocytidine-3'-phosphate
  modified_base 7: mod_base = OTHER; note = 2'-O-methyladenosine-3'-phosphate
  modified_base 8: mod_base = OTHER; note = 2'-fluorouridine-3'-phosphate
  modified_base 9: mod_base = OTHER; note = 2'-O-methylcytidine-3'-phosphate
  modified_base 10: mod_base = OTHER; note = 2'-fluorocytidine-3'-phosphate
  modified_base 11: mod_base = OTHER; note = 2'-O-methylguanosine-3'-phosphate
  modified_base 12: mod_base = OTHER; note = 2'-fluorocytidine-3'-phosphate
  modified_base 13: mod_base = OTHER; note = 2'-O-methyluridine-3'-phosphate
  modified_base 14: mod_base = OTHER; note = 2'-fluorocytidine-3'-phosphate
  modified_base 15: mod_base = OTHER; note = 2'-O-methylcytidine-3'-phosphate
  modified_base 16: mod_base = OTHER; note = 2'-fluorouridine-3'-phosphate
  modified_base 17: mod_base = OTHER; note = 2'-O-methylguanosine-3'-phosphate
  modified_base 18: mod_base = OTHER; note = 2'-fluorocytidine-3'-phosphate
  modified_base 19: mod_base = OTHER; note = 2'-O-methyladenosine-3'-phosphorothioate
  modified_base 20: mod_base = OTHER; note = 2'-O-methyladenosine-3'-phosphorothioate
  modified_base 21: mod_base = OTHER; note = 2'-O-methylcytidine
aactccatccgctcctgcaac

SEQ ID NO: 1249 - RNA, 21 nt, synthetic construct
  source 1..21: mol_type = other RNA
  modified_base 1: mod_base = OTHER; note = 5'-phosphate-2'-O-methyluridine-3'-phosphorothioate
  modified_base 2: mod_base = OTHER; note = 2'-fluoroadenosine-3'-phosphorothioate
  modified_base 3: mod_base = OTHER; note = 2'-O-methyladenosine-3'-phosphate
  modified_base 4: mod_base = OTHER; note = 2'-fluoroadenosine-3'-phosphate
  modified_base 5: mod_base = OTHER; note = 2'-O-methylguanosine-3'-phosphate
  modified_base 6: mod_base = OTHER; note = 2'-fluorocytidine-3'-phosphate
  modified_base 7: mod_base = OTHER; note = 2'-O-methylguanosine-3'-phosphate
  modified_base 8: mod_base = OTHER; note = 2'-fluorocytidine-3'-phosphate
  modified_base 9: mod_base = OTHER; note = 2'-O-methylcytidine-3'-phosphate
  modified_base 10: mod_base = OTHER; note = 2'-fluorouridine-3'-phosphate
  modified_base 11: mod_base = OTHER; note = 2'-O-methylcytidine-3'-phosphate
  modified_base 12: mod_base = OTHER; note = 2'-fluorocytidine-3'-phosphate
  modified_base 13: mod_base = OTHER; note = 2'-O-methylguanosine-3'-phosphate
  modified_base 14: mod_base = OTHER; note = 2'-fluoroadenosine-3'-phosphate
  modified_base 15: mod_base = OTHER; note = 2'-O-methyluridine-3'-phosphate
  modified_base 16: mod_base = OTHER; note = 2'-fluoroadenosine-3'-phosphate
  modified_base 17: mod_base = OTHER; note = 2'-O-methylguanosine-3'-phosphate
  modified_base 18: mod_base = OTHER; note = 2'-fluoroguanosine-3'-phosphate
  modified_base 19: mod_base = OTHER; note = 2'-O-methylcytidine-3'-phosphorothioate
  modified_base 20: mod_base = OTHER; note = 2'-O-methylcytidine-3'-phosphorothioate
  modified_base 21: mod_base = OTHER; note = 2'-O-methyladenosine
taaagcgcctccgataggcca

SEQ ID NO: 1250 - RNA, 21 nt, synthetic construct
  source 1..21: mol_type = other RNA
  modified_base 1: mod_base = OTHER; note = 5'-phosphate-2'-O-methyladenosine-3'-phosphorothioate
  modified_base 2: mod_base = OTHER; note = 2'-fluoroadenosine-3'-phosphorothioate
  modified_base 3: mod_base = OTHER; note = 2'-O-methyladenosine-3'-phosphate
  modified_base 4: mod_base = OTHER; note = 2'-fluoroguanosine-3'-phosphate
  modified_base 5: mod_base = OTHER; note = 2'-O-methyladenosine-3'-phosphate
  modified_base 6: mod_base = OTHER; note = 2'-fluorocytidine-3'-phosphate
  modified_base 7: mod_base = OTHER; note = 2'-O-methyladenosine-3'-phosphate
  modified_base 8: mod_base = OTHER; note = 2'-fluoroguanosine-3'-phosphate
  modified_base 9: mod_base = OTHER; note = 2'-O-methyluridine-3'-phosphate
  modified_base 10: mod_base = OTHER; note = 2'-fluorouridine-3'-phosphate
  modified_base 11: mod_base = OTHER; note = 2'-O-methylcytidine-3'-phosphate
  modified_base 12: mod_base = OTHER; note = 2'-fluorouridine-3'-phosphate
  modified_base 13: mod_base = OTHER; note = 2'-O-methyladenosine-3'-phosphate
  modified_base 14: mod_base = OTHER; note = 2'-fluoroguanosine-3'-phosphate
  modified_base 15: mod_base = OTHER; note = 2'-O-methylguanosine-3'-phosphate
  modified_base 16: mod_base = OTHER; note = 2'-fluoroguanosine-3'-phosphate
  modified_base 17: mod_base = OTHER; note = 2'-O-methyluridine-3'-phosphate
  modified_base 18: mod_base = OTHER; note = 2'-fluorouridine-3'-phosphate
  modified_base 19: mod_base = OTHER; note = 2'-O-methylcytidine-3'-phosphorothioate
  modified_base 20: mod_base = OTHER; note = 2'-O-methyladenosine-3'-phosphorothioate
  modified_base 21: mod_base = OTHER; note = 2'-O-methylguanosine
aaagacagttctagggttcag

SEQ ID NO: 1251 - RNA, 21 nt, synthetic construct
  source 1..21: mol_type = other RNA
  modified_base 1: mod_base = OTHER; note = 5'-phosphate-2'-O-methyladenosine-3'-phosphorothioate
  modified_base 2: mod_base = OTHER; note = 2'-fluoroguanosine-3'-phosphorothioate
  modified_base 3: mod_base = OTHER; note = 2'-O-methyladenosine-3'-phosphate
  modified_base 4: mod_base = OTHER; note = 2'-fluoroadenosine-3'-phosphate
  modified_base 5: mod_base = OTHER; note = 2'-O-methylguanosine-3'-phosphate
  modified_base 6: mod_base = OTHER; note = 2'-fluoroadenosine-3'-phosphate
  modified_base 7: mod_base = OTHER; note = 2'-O-methylcytidine-3'-phosphate
  modified_base 8: mod_base = OTHER; note = 2'-fluoroadenosine-3'-phosphate
  modified_base 9: mod_base = OTHER; note = 2'-O-methylguanosine-3'-phosphate
  modified_base 10: mod_base = OTHER; note = 2'-fluorouridine-3'-phosphate
  modified_base 11: mod_base = OTHER; note = 2'-O-methyluridine-3'-phosphate
  modified_base 12: mod_base = OTHER; note = 2'-fluorocytidine-3'-phosphate
  modified_base 13: mod_base = OTHER; note = 2'-O-methyluridine-3'-phosphate
  modified_base 14: mod_base = OTHER; note = 2'-fluoroadenosine-3'-phosphate
  modified_base 15: mod_base = OTHER; note = 2'-O-methylguanosine-3'-phosphate
  modified_base 16: mod_base = OTHER; note = 2'-fluoroguanosine-3'-phosphate
  modified_base 17: mod_base = OTHER; note = 2'-O-methylguanosine-3'-phosphate
  modified_base 18: mod_base = OTHER; note = 2'-fluorouridine-3'-phosphate
  modified_base 19: mod_base = OTHER; note = 2'-O-methyluridine-3'-phosphorothioate
  modified_base 20: mod_base = OTHER; note = 2'-O-methylcytidine-3'-phosphorothioate
  modified_base 21: mod_base = OTHER; note = 2'-O-methyladenosine
agaagacagttctagggttca

SEQ ID NO: 1252 - RNA, 21 nt, synthetic construct
  source 1..21: mol_type = other RNA
  modified_base 1: mod_base = OTHER; note = 5'-phosphate-2'-O-methyladenosine-3'-phosphorothioate
  modified_base 2: mod_base = OTHER; note = 2'-fluoroadenosine-3'-phosphorothioate
  modified_base 3: mod_base = OTHER; note = 2'-O-methylguanosine-3'-phosphate
  modified_base 4: mod_base = OTHER; note = 2'-fluorocytidine-3'-phosphate
  modified_base 5: mod_base = OTHER; note = 2'-O-methyladenosine-3'-phosphate
  modified_base 6: mod_base = OTHER; note = 2'-fluoroadenosine-3'-phosphate
  modified_base 7: mod_base = OTHER; note = 2'-O-methyladenosine-3'-phosphate
  modified_base 8: mod_base = OTHER; note = 2'-fluorouridine-3'-phosphate
  modified_base 9: mod_base = OTHER; note = 2'-O-methyluridine-3'-phosphate
  modified_base 10: mod_base = OTHER; note = 2'-fluorouridine-3'-phosphate
  modified_base 11: mod_base = OTHER; note = 2'-O-methylcytidine-3'-phosphate
  modified_base 12: mod_base = OTHER; note = 2'-fluorocytidine-3'-phosphate
  modified_base 13: mod_base = OTHER; note = 2'-O-methylcytidine-3'-phosphate
  modified_base 14: mod_base = OTHER; note = 2'-fluoroguanosine-3'-phosphate
  modified_base 15: mod_base = OTHER; note = 2'-O-methyladenosine-3'-phosphate
  modified_base 16: mod_base = OTHER; note = 2'-fluoroguanosine-3'-phosphate
  modified_base 17: mod_base = OTHER; note = 2'-O-methyluridine-3'-phosphate
  modified_base 18: mod_base = OTHER; note = 2'-fluoroadenosine-3'-phosphate
  modified_base 19: mod_base = OTHER; note = 2'-O-methyladenosine-3'-phosphorothioate
  modified_base 20: mod_base = OTHER; note = 2'-O-methylguanosine-3'-phosphorothioate
  modified_base 21: mod_base = OTHER; note = 2'-O-methylcytidine
aagcaaatttcccgagtaagc

SEQ ID NO: 1253 - RNA, 21 nt, synthetic construct
  source 1..21: mol_type = other RNA
  modified_base 1: mod_base = OTHER; note = 5'-phosphate-2'-O-methyluridine-3'-phosphorothioate
  modified_base 2: mod_base = OTHER; note = 2'-fluorocytidine-3'-phosphorothioate
  modified_base 3: mod_base = OTHER; note = 2'-O-methyladenosine-3'-phosphate
  modified_base 4: mod_base = OTHER; note = 2'-fluoroadenosine-3'-phosphate
  modified_base 5: mod_base = OTHER; note = 2'-O-methyladenosine-3'-phosphate
  modified_base 6: mod_base = OTHER; note = 2'-fluoroadenosine-3'-phosphate
  modified_base 7: mod_base = OTHER; note = 2'-O-methylguanosine-3'-phosphate
  modified_base 8: mod_base = OTHER; note = 2'-fluorocytidine-3'-phosphate
  modified_base 9: mod_base = OTHER; note = 2'-O-methyladenosine-3'-phosphate
  modified_base 10: mod_base = OTHER; note = 2'-fluoroadenosine-3'-phosphate
  modified_base 11: mod_base = OTHER; note = 2'-O-methyladenosine-3'-phosphate
  modified_base 12: mod_base = OTHER; note = 2'-fluorouridine-3'-phosphate
  modified_base 13: mod_base = OTHER; note = 2'-O-methyluridine-3'-phosphate
  modified_base 14: mod_base = OTHER; note = 2'-fluorouridine-3'-phosphate
  modified_base 15: mod_base = OTHER; note = 2'-O-methylcytidine-3'-phosphate
  modified_base 16: mod_base = OTHER; note = 2'-fluorocytidine-3'-phosphate
  modified_base 17: mod_base = OTHER; note = 2'-O-methylcytidine-3'-phosphate
  modified_base 18: mod_base = OTHER; note = 2'-fluoroguanosine-3'-phosphate
  modified_base 19: mod_base = OTHER; note = 2'-O-methyladenosine-3'-phosphorothioate
  modified_base 20: mod_base = OTHER; note = 2'-O-methylguanosine-3'-phosphorothioate
  modified_base 21: mod_base = OTHER; note = 2'-O-methyluridine
tcaaaagcaaatttcccgagt

SEQ ID NO: 1254 - RNA, 21 nt, synthetic construct
  source 1..21: mol_type = other RNA
  modified_base 1: mod_base = OTHER; note = 5'-phosphate-2'-O-methyluridine-3'-phosphorothioate
  modified_base 2: mod_base = OTHER; note = 2'-fluorouridine-3'-phosphorothioate
  modified_base 3: mod_base = OTHER; note = 2'-O-methyluridine-3'-phosphate
  modified_base 4: mod_base = OTHER; note = 2'-fluoroguanosine-3'-phosphate
  modified_base 5: mod_base = OTHER; note = 2'-O-methylguanosine-3'-phosphate
  modified_base 6: mod_base = OTHER; note = 2'-fluorocytidine-3'-phosphate
  modified_base 7: mod_base = OTHER; note = 2'-O-methyladenosine-3'-phosphate
  modified_base 8: mod_base = OTHER; note = 2'-fluoroadenosine-3'-phosphate
  modified_base 9: mod_base = OTHER; note = 2'-O-methyladenosine-3'-phosphate
  modified_base 10: mod_base = OTHER; note = 2'-fluoroadenosine-3'-phosphate
  modified_base 11: mod_base = OTHER; note = 2'-O-methylguanosine-3'-phosphate
  modified_base 12: mod_base = OTHER; note = 2'-fluorocytidine-3'-phosphate
  modified_base 13: mod_base = OTHER; note = 2'-O-methyladenosine-3'-phosphate
  modified_base 14: mod_base = OTHER; note = 2'-fluoroadenosine-3'-phosphate
  modified_base 15: mod_base = OTHER; note = 2'-O-methyladenosine-3'-phosphate
  modified_base 16: mod_base = OTHER; note = 2'-fluorouridine-3'-phosphate
  modified_base 17: mod_base = OTHER; note = 2'-O-methyluridine-3'-phosphate
  modified_base 18: mod_base = OTHER; note = 2'-fluorouridine-3'-phosphate
  modified_base 19: mod_base = OTHER; note = 2'-O-methylcytidine-3'-phosphorothioate
  modified_base 20: mod_base = OTHER; note = 2'-O-methylcytidine-3'-phosphorothioate
  modified_base 21: mod_base = OTHER; note = 2'-O-methylcytidine
tttggcaaaagcaaatttccc

SEQ ID NO: 1255 - RNA, 21 nt, synthetic construct
  source 1..21: mol_type = other RNA
  modified_base 1: mod_base = OTHER; note = 5'-phosphate-2'-O-methyladenosine-3'-phosphorothioate
  modified_base 2: mod_base = OTHER; note = 2'-fluoroadenosine-3'-phosphorothioate
  modified_base 3: mod_base = OTHER; note = 2'-O-methyluridine-3'-phosphate
  modified_base 4: mod_base = OTHER; note = 2'-fluoroadenosine-3'-phosphate
  modified_base 5: mod_base = OTHER; note = 2'-O-methyluridine-3'-phosphate
  modified_base 6: mod_base = OTHER; note = 2'-fluorocytidine-3'-phosphate
  modified_base 7: mod_base = OTHER; note = 2'-O-methylcytidine-3'-phosphate
  modified_base 8: mod_base = OTHER; note = 2'-fluoroadenosine-3'-phosphate
  modified_base 9: mod_base = OTHER; note = 2'-O-methyladenosine-3'-phosphate
  modified_base 10: mod_base = OTHER; note = 2'-fluoroadenosine-3'-phosphate
  modified_base 11: mod_base = OTHER; note = 2'-O-methylcytidine-3'-phosphate
  modified_base 12: mod_base = OTHER; note = 2'-fluorocytidine-3'-phosphate
  modified_base 13: mod_base = OTHER; note = 2'-O-methylguanosine-3'-phosphate
  modified_base 14: mod_base = OTHER; note = 2'-fluorocytidine-3'-phosphate
  modified_base 15: mod_base = OTHER; note = 2'-O-methylcytidine-3'-phosphate
  modified_base 16: mod_base = OTHER; note = 2'-fluoroguanosine-3'-phosphate
  modified_base 17: mod_base = OTHER; note = 2'-O-methyladenosine-3'-phosphate
  modified_base 18: mod_base = OTHER; note = 2'-fluoroadenosine-3'-phosphate
  modified_base 19: mod_base = OTHER; note = 2'-O-methylguanosine-3'-phosphorothioate
  modified_base 20: mod_base = OTHER; note = 2'-O-methylcytidine-3'-phosphorothioate
  modified_base 21: mod_base = OTHER; note = 2'-O-methylguanosine
aatatccaaaccgccgaagcg

SEQ ID NO: 1256 - RNA, 21 nt, synthetic construct
  source 1..21: mol_type = other RNA
  modified_base 1: mod_base = OTHER; note = 5'-phosphate-2'-O-methyluridine-3'-phosphorothioate
  modified_base 2: mod_base = OTHER; note = 2'-fluoroadenosine-3'-phosphorothioate
  modified_base 3: mod_base = OTHER; note = 2'-O-methyladenosine-3'-phosphate
  modified_base 4: mod_base = OTHER; note = 2'-fluoroadenosine-3'-phosphate
  modified_base 5: mod_base = OTHER; note = 2'-O-methyluridine-3'-phosphate
  modified_base 6: mod_base = OTHER; note = 2'-fluoroadenosine-3'-phosphate
  modified_base 7: mod_base = OTHER; note = 2'-O-methyluridine-3'-phosphate
  modified_base 8: mod_base = OTHER; note = 2'-fluorocytidine-3'-phosphate
  modified_base 9: mod_base = OTHER; note = 2'-O-methylcytidine-3'-phosphate
  modified_base 10: mod_base = OTHER; note = 2'-fluoroadenosine-3'-phosphate
  modified_base 11: mod_base = OTHER; note = 2'-O-methyladenosine-3'-phosphate
  modified_base 12: mod_base = OTHER; note = 2'-fluoroadenosine-3'-phosphate
  modified_base 13: mod_base = OTHER; note = 2'-O-methylcytidine-3'-phosphate
  modified_base 14: mod_base = OTHER; note = 2'-fluorocytidine-3'-phosphate
  modified_base 15: mod_base = OTHER; note = 2'-O-methylguanosine-3'-phosphate
  modified_base 16: mod_base = OTHER; note = 2'-fluorocytidine-3'-phosphate
  modified_base 17: mod_base = OTHER; note = 2'-O-methylcytidine-3'-phosphate
  modified_base 18: mod_base = OTHER; note = 2'-fluoroguanosine-3'-phosphate
  modified_base 19: mod_base = OTHER; note = 2'-O-methyladenosine-3'-phosphorothioate
  modified_base 20: mod_base = OTHER; note = 2'-O-methyladenosine-3'-phosphorothioate
  modified_base 21: mod_base = OTHER; note = 2'-O-methylguanosine
taaatatccaaaccgccgaag

SEQ ID NO: 1257 - RNA, 21 nt, synthetic construct
  source 1..21: mol_type = other RNA
  modified_base 1: mod_base = OTHER; note = 5'-phosphate-2'-O-methyluridine-3'-phosphorothioate
  modified_base 2: mod_base = OTHER; note = 2'-fluorocytidine-3'-phosphorothioate
  modified_base 3: mod_base = OTHER; note = 2'-O-methyladenosine-3'-phosphate
  modified_base 4: mod_base = OTHER; note = 2'-fluoroadenosine-3'-phosphate
  modified_base 5: mod_base = OTHER; note = 2'-O-methyluridine-3'-phosphate
  modified_base 6: mod_base = OTHER; note = 2'-fluoroadenosine-3'-phosphate
  modified_base 7: mod_base = OTHER; note = 2'-O-methyladenosine-3'-phosphate
  modified_base 8: mod_base = OTHER; note = 2'-fluoroadenosine-3'-phosphate
  modified_base 9: mod_base = OTHER; note = 2'-O-methyluridine-3'-phosphate
  modified_base 10: mod_base = OTHER; note = 2'-fluoroadenosine-3'-phosphate
  modified_base 11: mod_base = OTHER; note = 2'-O-methyluridine-3'-phosphate
  modified_base 12: mod_base = OTHER; note = 2'-fluorocytidine-3'-phosphate
  modified_base 13: mod_base = OTHER; note = 2'-O-methylcytidine-3'-phosphate
  modified_base 14: mod_base = OTHER; note = 2'-fluoroadenosine-3'-phosphate
  modified_base 15: mod_base = OTHER; note = 2'-O-methyladenosine-3'-phosphate
  modified_base 16: mod_base = OTHER; note = 2'-fluoroadenosine-3'-phosphate
  modified_base 17: mod_base = OTHER; note = 2'-O-methylcytidine-3'-phosphate
  modified_base 18: mod_base = OTHER; note = 2'-fluorocytidine-3'-phosphate
  modified_base 19: mod_base = OTHER; note = 2'-O-methylguanosine-3'-phosphorothioate
  modified_base 20: mod_base = OTHER; note = 2'-O-methylcytidine-3'-phosphorothioate
  modified_base 21: mod_base = OTHER; note = 2'-O-methylcytidine
tcaataaatatccaaaccgcc

SEQ ID NO: 1258 - RNA, 21 nt, synthetic construct
  source 1..21: mol_type = other RNA
  modified_base 1: mod_base = OTHER; note = 5'-phosphate-2'-O-methyladenosine-3'-phosphorothioate
  modified_base 2: mod_base = OTHER; note = 2'-fluorouridine-3'-phosphorothioate
  modified_base 3: mod_base = OTHER; note = 2'-O-methylcytidine-3'-phosphate
  modified_base 4: mod_base = OTHER; note = 2'-fluoroadenosine-3'-phosphate
  modified_base 5: mod_base = OTHER; note = 2'-O-methyladenosine-3'-phosphate
  modified_base 6: mod_base = OTHER; note = 2'-fluorouridine-3'-phosphate
  modified_base 7: mod_base = OTHER; note = 2'-O-methyladenosine-3'-phosphate
  modified_base 8: mod_base = OTHER; note = 2'-fluoroadenosine-3'-phosphate
  modified_base 9: mod_base = OTHER; note = 2'-O-methyladenosine-3'-phosphate
  modified_base 10: mod_base = OTHER; note = 2'-fluorouridine-3'-phosphate
  modified_base 11: mod_base = OTHER; note = 2'-O-methyladenosine-3'-phosphate
  modified_base 12: mod_base = OTHER; note = 2'-fluorouridine-3'-phosphate
  modified_base 13: mod_base = OTHER; note = 2'-O-methylcytidine-3'-phosphate
  modified_base 14: mod_base = OTHER; note = 2'-fluorocytidine-3'-phosphate
  modified_base 15: mod_base = OTHER; note = 2'-O-methyladenosine-3'-phosphate
  modified_base 16: mod_base = OTHER; note = 2'-fluoroadenosine-3'-phosphate
  modified_base 17: mod_base = OTHER; note = 2'-O-methyladenosine-3'-phosphate
  modified_base 18: mod_base = OTHER; note = 2'-fluorocytidine-3'-phosphate
  modified_base 19: mod_base = OTHER; note = 2'-O-methylcytidine-3'-phosphorothioate
  modified_base 20: mod_base = OTHER; note = 2'-O-methylguanosine-3'-phosphorothioate
  modified_base 21: mod_base = OTHER; note = 2'-O-methylcytidine
atcaataaatatccaaaccgc

SEQ ID NO: 1259 - RNA, 21 nt, synthetic construct
  source 1..21: mol_type = other RNA
  modified_base 1: mod_base = OTHER; note = 5'-phosphate-2'-O-methyladenosine-3'-phosphorothioate
  modified_base 2: mod_base = OTHER; note = 2'-fluoroguanosine-3'-phosphorothioate
  modified_base 3: mod_base = OTHER; note = 2'-O-methyluridine-3'-phosphate
  modified_base 4: mod_base = OTHER; note = 2'-fluorocytidine-3'-phosphate
  modified_base 5: mod_base = OTHER; note = 2'-O-methyladenosine-3'-phosphate
  modified_base 6: mod_base = OTHER; note = 2'-fluoroadenosine-3'-phosphate
  modified_base 7: mod_base = OTHER; note = 2'-O-methyluridine-3'-phosphate
  modified_base 8: mod_base = OTHER; note = 2'-fluoroadenosine-3'-phosphate
  modified_base 9: mod_base = OTHER; note = 2'-O-methyladenosine-3'-phosphate
  modified_base 10: mod_base = OTHER; note = 2'-fluoroadenosine-3'-phosphate
  modified_base 11: mod_base = OTHER; note = 2'-O-methyluridine-3'-phosphate
  modified_base 12: mod_base = OTHER; note = 2'-fluoroadenosine-3'-phosphate
  modified_base 13: mod_base = OTHER; note = 2'-O-methyluridine-3'-phosphate
  modified_base 14: mod_base = OTHER; note = 2'-fluorocytidine-3'-phosphate
  modified_base 15: mod_base = OTHER; note = 2'-O-methylcytidine-3'-phosphate
  modified_base 16: mod_base = OTHER; note = 2'-fluoroadenosine-3'-phosphate
  modified_base 17: mod_base = OTHER; note = 2'-O-methyladenosine-3'-phosphate
  modified_base 18: mod_base = OTHER; note = 2'-fluoroadenosine-3'-phosphate
  modified_base 19: mod_base = OTHER; note = 2'-O-methylcytidine-3'-phosphorothioate
  modified_base 20: mod_base = OTHER; note = 2'-O-methylcytidine-3'-phosphorothioate
  modified_base 21: mod_base = OTHER; note = 2'-O-methylguanosine
agtcaataaatatccaaaccg

SEQ ID NO: 1260 - RNA, 21 nt, synthetic construct
  source 1..21: mol_type = other RNA
  modified_base 1: mod_base = OTHER; note = 5'-phosphate-2'-O-methyladenosine-3'-phosphorothioate
  modified_base 2: mod_base = OTHER; note = 2'-fluorocytidine-3'-phosphorothioate
  modified_base 3: mod_base = OTHER; note = 2'-O-methylguanosine-3'-phosphate
  modified_base 4: mod_base = OTHER; note = 2'-fluoroadenosine-3'-phosphate
  modified_base 5: mod_base = OTHER; note = 2'-O-methylguanosine-3'-phosphate
  modified_base 6: mod_base = OTHER; note = 2'-fluoroguanosine-3'-phosphate
  modified_base 7: mod_base = OTHER; note = 2'-O-methyluridine-3'-phosphate
  modified_base 8: mod_base = OTHER; note = 2'-fluorocytidine-3'-phosphate
  modified_base 9: mod_base = OTHER; note = 2'-O-methyladenosine-3'-phosphate
  modified_base 10: mod_base = OTHER; note = 2'-fluoroadenosine-3'-phosphate
  modified_base 11: mod_base = OTHER; note = 2'-O-methyluridine-3'-phosphate
  modified_base 12: mod_base = OTHER; note = 2'-fluoroadenosine-3'-phosphate
  modified_base 13: mod_base = OTHER; note = 2'-O-methyladenosine-3'-phosphate
  modified_base 14: mod_base = OTHER; note = 2'-fluoroadenosine-3'-phosphate
  modified_base 15: mod_base = OTHER; note = 2'-O-methyluridine-3'-phosphate
  modified_base 16: mod_base = OTHER; note = 2'-fluoroadenosine-3'-phosphate
  modified_base 17: mod_base = OTHER; note = 2'-O-methyluridine-3'-phosphate
  modified_base 18: mod_base = OTHER; note = 2'-fluorocytidine-3'-phosphate
  modified_base 19: mod_base = OTHER; note = 2'-O-methylcytidine-3'-phosphorothioate
  modified_base 20: mod_base = OTHER; note = 2'-O-methyladenosine-3'-phosphorothioate
  modified_base 21: mod_base = OTHER; note = 2'-O-methyladenosine
acgaggtcaataaatatccaa

SEQ ID NO: 1261 - RNA, 21 nt, synthetic construct
  source 1..21: mol_type = other RNA
  modified_base 1: mod_base = OTHER; note = 5'-phosphate-2'-O-methyluridine-3'-phosphorothioate
  modified_base 2: mod_base = OTHER; note = 2'-fluoroadenosine-3'-phosphorothioate
  modified_base 3: mod_base = OTHER; note = 2'-O-methylcytidine-3'-phosphate
  modified_base 4: mod_base = OTHER; note = 2'-fluoroguanosine-3'-phosphate
  modified_base 5: mod_base = OTHER; note = 2'-O-methyladenosine-3'-phosphate
  modified_base 6: mod_base = OTHER; note = 2'-fluoroguanosine-3'-phosphate
  modified_base 7: mod_base = OTHER; note = 2'-O-methylguanosine-3'-phosphate
  modified_base 8: mod_base = OTHER; note = 2'-fluorouridine-3'-phosphate
  modified_base 9: mod_base = OTHER; note = 2'-O-methylcytidine-3'-phosphate
  modified_base 10: mod_base = OTHER; note = 2'-fluoroadenosine-3'-phosphate
  modified_base 11: mod_base = OTHER; note = 2'-O-methyladenosine-3'-phosphate
  modified_base 12: mod_base = OTHER; note = 2'-fluorouridine-3'-phosphate
  modified_base 13: mod_base = OTHER; note = 2'-O-methyladenosine-3'-phosphate
  modified_base 14: mod_base = OTHER; note = 2'-fluoroadenosine-3'-phosphate
  modified_base 15: mod_base = OTHER; note = 2'-O-methyladenosine-3'-phosphate
  modified_base 16: mod_base = OTHER; note = 2'-fluorouridine-3'-phosphate
  modified_base 17: mod_base = OTHER; note = 2'-O-methyladenosine-3'-phosphate
  modified_base 18: mod_base = OTHER; note = 2'-fluorouridine-3'-phosphate
  modified_base 19: mod_base = OTHER; note = 2'-O-methylcytidine-3'-phosphorothioate
  modified_base 20: mod_base = OTHER; note = 2'-O-methylcytidine-3'-phosphorothioate
  modified_base 21: mod_base = OTHER; note = 2'-O-methyladenosine
tacgaggtcaataaatatcca

SEQ ID NO: 1262 - RNA, 21 nt, synthetic construct
  source 1..21: mol_type = other RNA
  modified_base 1: mod_base = OTHER; note = 5'-phosphate-2'-O-methyladenosine-3'-phosphorothioate
  modified_base 2: mod_base = OTHER; note = 2'-fluoroguanosine-3'-phosphorothioate
  modified_base 3: mod_base = OTHER; note = 2'-O-methyladenosine-3'-phosphate
  modified_base 4: mod_base = OTHER; note = 2'-fluorocytidine-3'-phosphate
  modified_base 5: mod_base = OTHER; note = 2'-O-methylguanosine-3'-phosphate
  modified_base 6: mod_base = OTHER; note = 2'-fluoroadenosine-3'-phosphate
  modified_base 7: mod_base = OTHER; note = 2'-O-methylguanosine-3'-phosphate
  modified_base 8: mod_base = OTHER; note = 2'-fluoroguanosine-3'-phosphate
  modified_base 9: mod_base = OTHER; note = 2'-O-methyluridine-3'-phosphate
  modified_base 10: mod_base = OTHER; note = 2'-fluorocytidine-3'-phosphate
  modified_base 11: mod_base = OTHER; note = 2'-O-methyladenosine-3'-phosphate
  modified_base 12: mod_base = OTHER; note = 2'-fluoroadenosine-3'-phosphate
  modified_base 13: mod_base = OTHER; note = 2'-O-methyluridine-3'-phosphate
  modified_base 14: mod_base = OTHER; note = 2'-fluoroadenosine-3'-phosphate
  modified_base 15: mod_base = OTHER; note = 2'-O-methyladenosine-3'-phosphate
  modified_base 16: mod_base = OTHER; note = 2'-fluoroadenosine-3'-phosphate
  modified_base 17: mod_base = OTHER; note = 2'-O-methyluridine-3'-phosphate
  modified_base 18: mod_base = OTHER; note = 2'-fluoroadenosine-3'-phosphate
  modified_base 19: mod_base = OTHER; note = 2'-O-methyluridine-3'-phosphorothioate
  modified_base 20: mod_base = OTHER; note = 2'-O-methylcytidine-3'-phosphorothioate
  modified_base 21: mod_base = OTHER; note = 2'-O-methylcytidine
agacgaggtcaataaatatcc

SEQ ID NO: 1263 - RNA, 21 nt, synthetic construct
  source 1..21: mol_type = other RNA
  modified_base 1: mod_base = OTHER; note = 5'-phosphate-2'-O-methyladenosine-3'-phosphorothioate
  modified_base 2: mod_base = OTHER; note = 2'-fluorouridine-3'-phosphorothioate
  modified_base 3: mod_base = OTHER; note = 2'-O-methylcytidine-3'-phosphate
  modified_base 4: mod_base = OTHER; note = 2'-fluorocytidine-3'-phosphate
  modified_base 5: mod_base = OTHER; note = 2'-O-methyladenosine-3'-phosphate
  modified_base 6: mod_base = OTHER; note = 2'-fluoroadenosine-3'-phosphate
  modified_base 7: mod_base = OTHER; note = 2'-O-methyladenosine-3'-phosphate
  modified_base 8: mod_base = OTHER; note = 2'-fluoroadenosine-3'-phosphate
  modified_base 9: mod_base = OTHER; note = 2'-O-methylcytidine-3'-phosphate
  modified_base 10: mod_base = OTHER; note = 2'-fluoroguanosine-3'-phosphate
  modified_base 11: mod_base = OTHER; note = 2'-O-methyluridine-3'-phosphate
  modified_base 12: mod_base = OTHER; note = 2'-fluoroguanosine-3'-phosphate
  modified_base 13: mod_base = OTHER; note = 2'-O-methylguanosine-3'-phosphate
  modified_base 14: mod_base = OTHER; note = 2'-fluoroadenosine-3'-phosphate
  modified_base 15: mod_base = OTHER; note = 2'-O-methyluridine-3'-phosphate
  modified_base 16: mod_base = OTHER; note = 2'-fluorouridine-3'-phosphate
  modified_base 17: mod_base = OTHER; note = 2'-O-methylguanosine-3'-phosphate
  modified_base 18: mod_base = OTHER; note = 2'-fluoroguanosine-3'-phosphate
  modified_base 19: mod_base = OTHER; note = 2'-O-methylguanosine-3'-phosphorothioate
  modified_base 20: mod_base = OTHER; note = 2'-O-methyluridine-3'-phosphorothioate
  modified_base 21: mod_base = OTHER; note = 2'-O-methylguanosine
atccaaaacgtggattgggtg

SEQ ID NO: 1264 - RNA, 21 nt, synthetic construct
  source 1..21: mol_type = other RNA
  modified_base 1: mod_base = OTHER; note = 5'-phosphate-2'-O-methyladenosine-3'-phosphorothioate
  modified_base 2: mod_base = OTHER; note = 2'-fluorouridine-3'-phosphorothioate
  modified_base 3: mod_base = OTHER; note = 2'-O-methylguanosine-3'-phosphate
  modified_base 4: mod_base = OTHER; note = 2'-fluorocytidine-3'-phosphate
  modified_base 5: mod_base = OTHER; note = 2'-O-methyladenosine-3'-phosphate
  modified_base 6: mod_base = OTHER; note = 2'-fluorouridine-3'-phosphate
  modified_base 7: mod_base = OTHER; note = 2'-O-methylcytidine-3'-phosphate
  modified_base 8: mod_base = OTHER; note = 2'-fluorocytidine-3'-phosphate
  modified_base 9: mod_base = OTHER; note = 2'-O-methyladenosine-3'-phosphate
  modified_base 10: mod_base = OTHER; note = 2'-fluoroadenosine-3'-phosphate
  modified_base 11: mod_base = OTHER; note = 2'-O-methyladenosine-3'-phosphate
  modified_base 12: mod_base = OTHER; note = 2'-fluoroadenosine-3'-phosphate
  modified_base 13: mod_base = OTHER; note = 2'-O-methylcytidine-3'-phosphate
  modified_base 14: mod_base = OTHER; note = 2'-fluoroguanosine-3'-phosphate
  modified_base 15: mod_base = OTHER; note = 2'-O-methyluridine-3'-phosphate
  modified_base 16: mod_base = OTHER; note = 2'-fluoroguanosine-3'-phosphate
  modified_base 17: mod_base = OTHER; note = 2'-O-methylguanosine-3'-phosphate
  modified_base 18: mod_base = OTHER; note = 2'-fluoroadenosine-3'-phosphate
  modified_base 19: mod_base = OTHER; note = 2'-O-methyluridine-3'-phosphorothioate
  modified_base 20: mod_base = OTHER; note = 2'-O-methyluridine-3'-phosphorothioate
  modified_base 21: mod_base = OTHER; note = 2'-O-methylguanosine
atgcatccaaaacgtggattg

SEQ ID NO: 1265 - RNA, 21 nt, synthetic construct
  source 1..21: mol_type = other RNA
  modified_base 1: mod_base = OTHER; note = 5'-phosphate-2'-O-methyladenosine-3'-phosphorothioate
  modified_base 2: mod_base = OTHER; note = 2'-fluoroadenosine-3'-phosphorothioate
  modified_base 3: mod_base = OTHER; note = 2'-O-methylguanosine-3'-phosphate
  modified_base 4: mod_base = OTHER; note = 2'-fluorouridine-3'-phosphate
  modified_base 5: mod_base = OTHER; note = 2'-O-methylguanosine-3'-phosphate
  modified_base 6: mod_base = OTHER; note = 2'-fluorocytidine-3'-phosphate
  modified_base 7: mod_base = OTHER; note = 2'-O-methyladenosine-3'-phosphate
  modified_base 8: mod_base = OTHER; note = 2'-fluorouridine-3'-phosphate
  modified_base 9: mod_base = OTHER; note = 2'-O-methylcytidine-3'-phosphate
  modified_base 10: mod_base = OTHER; note = 2'-fluorocytidine-3'-phosphate
  modified_base 11: mod_base = OTHER; note = 2'-O-methyladenosine-3'-phosphate
  modified_base 12: mod_base = OTHER; note = 2'-fluoroadenosine-3'-phosphate
  modified_base 13: mod_base = OTHER; note = 2'-O-methyladenosine-3'-phosphate
  modified_base 14: mod_base = OTHER; note = 2'-fluoroadenosine-3'-phosphate
  modified_base 15: mod_base = OTHER; note = 2'-O-methylcytidine-3'-phosphate
  modified_base 16: mod_base = OTHER; note = 2'-fluoroguanosine-3'-phosphate
  modified_base 17: mod_base = OTHER; note = 2'-O-methyluridine-3'-phosphate
  modified_base 18: mod_base = OTHER; note = 2'-fluoroguanosine-3'-phosphate
  modified_base 19: mod_base = OTHER; note = 2'-O-methylguanosine-3'-phosphorothioate
  modified_base 20: mod_base = OTHER; note = 2'-O-methyladenosine-3'-phosphorothioate
  modified_base 21: mod_base = OTHER; note = 2'-O-methyluridine
aagtgcatccaaaacgtggat

SEQ ID NO: 1266 - RNA, 21 nt, synthetic construct
  source 1..21: mol_type = other RNA
  modified_base 1: mod_base = OTHER; note = 5'-phosphate-2'-O-methyluridine-3'-phosphorothioate
  modified_base 2: mod_base = OTHER; note = 2'-fluorocytidine-3'-phosphorothioate
  modified_base 3: mod_base = OTHER; note = 2'-O-methyluridine-3'-phosphate
  modified_base 4: mod_base = OTHER; note = 2'-fluorocytidine-3'-phosphate
  modified_base 5: mod_base = OTHER; note = 2'-O-methyladenosine-3'-phosphate
  modified_base 6: mod_base = OTHER; note = 2'-fluoroguanosine-3'-phosphate
  modified_base 7: mod_base = OTHER; note = 2'-O-methyluridine-3'-phosphate
  modified_base 8: mod_base = OTHER; note = 2'-fluoroguanosine-3'-phosphate
  modified_base 9: mod_base = OTHER; note = 2'-O-methylcytidine-3'-phosphate
  modified_base 10: mod_base = OTHER; note = 2'-fluoroadenosine-3'-phosphate
  modified_base 11: mod_base = OTHER; note = 2'-O-methyluridine-3'-phosphate
  modified_base 12: mod_base = OTHER; note = 2'-fluorocytidine-3'-phosphate
  modified_base 13: mod_base = OTHER; note = 2'-O-methylcytidine-3'-phosphate
  modified_base 14: mod_base = OTHER; note = 2'-fluoroadenosine-3'-phosphate
  modified_base 15: mod_base = OTHER; note = 2'-O-methyladenosine-3'-phosphate
  modified_base 16: mod_base = OTHER; note = 2'-fluoroadenosine-3'-phosphate
  modified_base 17: mod_base = OTHER; note = 2'-O-methyladenosine-3'-phosphate
  modified_base 18: mod_base = OTHER; note = 2'-fluorocytidine-3'-phosphate
  modified_base 19: mod_base = OTHER; note = 2'-O-methylguanosine-3'-phosphorothioate
  modified_base 20: mod_base = OTHER; note = 2'-O-methyluridine-3'-phosphorothioate
  modified_base 21: mod_base = OTHER; note = 2'-O-methylguanosine
tctcagtgcatccaaaacgtg

SEQ ID NO: 1267 - RNA, 19 nt, synthetic construct
  source 1..19: mol_type = other RNA
  modified_base 1: mod_base = OTHER; note = 2'-fluorocytidine-3'-phosphorothioate
  modified_base 2: mod_base = OTHER; note = 2'-O-methylcytidine-3'-phosphorothioate
  modified_base 3: mod_base = OTHER; note = 2'-fluorouridine-3'-phosphate
  modified_base 4: mod_base = OTHER; note = 2'-O-methylcytidine-3'-phosphate
  modified_base 5: mod_base = OTHER; note = 2'-fluoroguanosine-3'-phosphate
  modified_base 6: mod_base = OTHER; note = 2'-O-methylguanosine-3'-phosphate
  modified_base 7: mod_base = OTHER; note = 2'-fluorouridine-3'-phosphate
  modified_base 8: mod_base = OTHER; note = 2'-O-methyladenosine-3'-phosphate
  modified_base 9: mod_base = OTHER; note = 2'-fluorouridine-3'-phosphate
  modified_base 10: mod_base = OTHER; note = 2'-O-methyluridine-3'-phosphate
  modified_base 11: mod_base = OTHER; note = 2'-fluorouridine-3'-phosphate
  modified_base 12: mod_base = OTHER; note = 2'-O-methyladenosine-3'-phosphate
  modified_base 13: mod_base = OTHER; note = 2'-fluorouridine-3'-phosphate
  modified_base 14: mod_base = OTHER; note = 2'-O-methyluridine-3'-phosphate
  modified_base 15: mod_base = OTHER; note = 2'-fluoroguanosine-3'-phosphate
  modified_base 16: mod_base = OTHER; note = 2'-O-methyluridine-3'-phosphate
  modified_base 17: mod_base = OTHER; note = 2'-fluorocytidine-3'-phosphorothioate
  modified_base 18: mod_base = OTHER; note = 2'-O-methyluridine-3'-phosphorothioate
  modified_base 19: mod_base = OTHER; note 2'-fluoroadenosine-3'-phosphate-N,N'-((5S)-6-((6-hydroxy-5- (lambda-3-methyl)hexyl)amino)-6-oxohexane-1,5-diyl)ditetrad ecanamide
cctcggtatttattgtcta

SEQ ID NO: 1268 - RNA, 21 nt, synthetic construct
  source 1..21: mol_type = other RNA
  modified_base 1: mod_base = OTHER; note 5'-(E)-vinylphosphonate-2'-O-methyluridine-3'-phosphorothio ate
  modified_base 2: mod_base = OTHER; note = 2'-fluoroadenosine-3'-phosphorothioate
  modified_base 3: mod_base = OTHER; note = 2'-O-methylguanosine-3'-phosphate
  modified_base 4: mod_base = OTHER; note = 2'-fluoroadenosine-3'-phosphate
  modified_base 5: mod_base = OTHER; note = 2'-O-methylcytidine-3'-phosphate
  modified_base 6: mod_base = OTHER; note = 2'-fluoroadenosine-3'-phosphate
  modified_base 7: mod_base = OTHER; note = 2'-O-methyladenosine-3'-phosphate
  modified_base 8: mod_base = OTHER; note = 2'-fluorouridine-3'-phosphate
  modified_base 9: mod_base = OTHER; note = 2'-O-methyladenosine-3'-phosphate
  modified_base 10: mod_base = OTHER; note = 2'-fluoroadenosine-3'-phosphate
  modified_base 11: mod_base = OTHER; note = 2'-O-methyladenosine-3'-phosphate
  modified_base 12: mod_base = OTHER; note = 2'-fluorouridine-3'-phosphate
  modified_base 13: mod_base = OTHER; note = 2'-O-methyladenosine-3'-phosphate
  modified_base 14: mod_base = OTHER; note = 2'-fluorocytidine-3'-phosphate
  modified_base 15: mod_base = OTHER; note = 2'-O-methylcytidine-3'-phosphate
  modified_base 16: mod_base = OTHER; note = 2'-fluoroguanosine-3'-phosphate
  modified_base 17: mod_base = OTHER; note = 2'-O-methyladenosine-3'-phosphate
  modified_base 18: mod_base = OTHER; note = 2'-fluoroguanosine-3'-phosphate
  modified_base 19: mod_base = OTHER; note = 2'-O-methylguanosine-3'-phosphorothioate
  modified_base 20: mod_base = OTHER; note = 2'-O-methyladenosine-3'-phosphorothioate
  modified_base 21: mod_base = OTHER; note = 2'-O-methyladenosine
tagacaataaataccgaggaa

SEQ ID NO: 1269 - RNA, 19 nt, synthetic construct
  source 1..19: mol_type = other RNA
  modified_base 1: mod_base = OTHER; note = 2'-fluorouridine-3'-phosphorothioate
  modified_base 2: mod_base = OTHER; note = 2'-O-methylguanosine-3'-phosphorothioate
  modified_base 3: mod_base = OTHER; note = 2'-fluorocytidine-3'-phosphate
  modified_base 4: mod_base = OTHER; note = 2'-O-methyladenosine-3'-phosphate
  modified_base 5: mod_base = OTHER; note = 2'-fluorocytidine-3'-phosphate
  modified_base 6: mod_base = OTHER; note = 2'-O-methyladenosine-3'-phosphate
  modified_base 7: mod_base = OTHER; note = 2'-fluoroguanosine-3'-phosphate
  modified_base 8: mod_base = OTHER; note = 2'-O-methylguanosine-3'-phosphate
  modified_base 9: mod_base = OTHER; note = 2'-fluoroguanosine-3'-phosphate
  modified_base 10: mod_base = OTHER; note = 2'-O-methyladenosine-3'-phosphate
  modified_base 11: mod_base = OTHER; note = 2'-fluorocytidine-3'-phosphate
  modified_base 12: mod_base = OTHER; note = 2'-O-methyladenosine-3'-phosphate
  modified_base 13: mod_base = OTHER; note = 2'-fluorouridine-3'-phosphate
  modified_base 14: mod_base = OTHER; note = 2'-O-methylcytidine-3'-phosphate
  modified_base 15: mod_base = OTHER; note = 2'-fluoroadenosine-3'-phosphate
  modified_base 16: mod_base = OTHER; note = 2'-O-methyladenosine-3'-phosphate
  modified_base 17: mod_base = OTHER; note = 2'-fluoroadenosine-3'-phosphorothioate
  modified_base 18: mod_base = OTHER; note = 2'-O-methylcytidine-3'-phosphorothioate
  modified_base 19: mod_base = OTHER; note 2'-fluorouridine-3'-phosphate-N,N'-((5S)-6-((6-hydroxy-5-(l ambda-3-methyl)hexyl)amino)-6-oxohexane-1,5-diyl)ditetradec anamide
tgcacagggacatcaaact

SEQ ID NO: 1270 - RNA, 21 nt, synthetic construct
  source 1..21: mol_type = other RNA
  modified_base 1: mod_base = OTHER; note 5'-(E)-vinylphosphonate-2'-O-methyladenosine-3'-phosphoroth ioate
  modified_base 2: mod_base = OTHER; note = 2'-fluoroguanosine-3'-phosphorothioate
  modified_base 3: mod_base = OTHER; note = 2'-O-methyluridine-3'-phosphate
  modified_base 4: mod_base = OTHER; note = 2'-fluorouridine-3'-phosphate
  modified_base 5: mod_base = OTHER; note = 2'-O-methyluridine-3'-phosphate
  modified_base 6: mod_base = OTHER; note = 2'-fluoroguanosine-3'-phosphate
  modified_base 7: mod_base = OTHER; note = 2'-O-methyladenosine-3'-phosphate
  modified_base 8: mod_base = OTHER; note = 2'-fluorouridine-3'-phosphate
  modified_base 9: mod_base = OTHER; note = 2'-O-methylguanosine-3'-phosphate
  modified_base 10: mod_base = OTHER; note = 2'-fluorouridine-3'-phosphate
  modified_base 11: mod_base = OTHER; note = 2'-O-methylcytidine-3'-phosphate
  modified_base 12: mod_base = OTHER; note = 2'-fluorocytidine-3'-phosphate
  modified_base 13: mod_base = OTHER; note = 2'-O-methylcytidine-3'-phosphate
  modified_base 14: mod_base = OTHER; note = 2'-fluorouridine-3'-phosphate
  modified_base 15: mod_base = OTHER; note = 2'-O-methylguanosine-3'-phosphate
  modified_base 16: mod_base = OTHER; note = 2'-fluorouridine-3'-phosphate
  modified_base 17: mod_base = OTHER; note = 2'-O-methylguanosine-3'-phosphate
  modified_base 18: mod_base = OTHER; note = 2'-fluorocytidine-3'-phosphate
  modified_base 19: mod_base = OTHER; note = 2'-O-methyladenosine-3'-phosphorothioate
  modified_base 20: mod_base = OTHER; note = 2'-O-methylcytidine-3'-phosphorothioate
  modified_base 21: mod_base = OTHER; note = 2'-O-methylguanosine
agtttgatgtccctgtgcacg

SEQ ID NO: 1271 - RNA, 19 nt, synthetic construct
  source 1..19: mol_type = other RNA
  modified_base 1: mod_base = OTHER; note = 2'-fluorocytidine-3'-phosphorothioate
  modified_base 2: mod_base = OTHER; note = 2'-O-methyladenosine-3'-phosphorothioate
  modified_base 3: mod_base = OTHER; note = 2'-fluorocytidine-3'-phosphate
  modified_base 4: mod_base = OTHER; note = 2'-O-methylguanosine-3'-phosphate
  modified_base 5: mod_base = OTHER; note = 2'-fluoroguanosine-3'-phosphate
  modified_base 6: mod_base = OTHER; note = 2'-O-methyladenosine-3'-phosphate
  modified_base 7: mod_base = OTHER; note = 2'-fluorouridine-3'-phosphate
  modified_base 8: mod_base = OTHER; note = 2'-O-methylcytidine-3'-phosphate
  modified_base 9: mod_base = OTHER; note = 2'-fluorocytidine-3'-phosphate
  modified_base 10: mod_base = OTHER; note = 2'-O-methyladenosine-3'-phosphate
  modified_base 11: mod_base = OTHER; note = 2'-fluorocytidine-3'-phosphate
  modified_base 12: mod_base = OTHER; note = 2'-O-methylcytidine-3'-phosphate
  modified_base 13: mod_base = OTHER; note = 2'-fluorouridine-3'-phosphate
  modified_base 14: mod_base = OTHER; note = 2'-O-methyluridine-3'-phosphate
  modified_base 15: mod_base = OTHER; note = 2'-fluorocytidine-3'-phosphate
  modified_base 16: mod_base = OTHER; note = 2'-O-methylcytidine-3'-phosphate
  modified_base 17: mod_base = OTHER; note = 2'-fluorocytidine-3'-phosphorothioate
  modified_base 18: mod_base = OTHER; note = 2'-O-methyladenosine-3'-phosphorothioate
  modified_base 19: mod_base = OTHER; note 2'-fluorouridine-3'-phosphate-N,N'-((5S)-6-((6-hydroxy-5-(l ambda-3-methyl)hexyl)amino)-6-oxohexane-1,5-diyl)ditetradec anamide
cacggatccaccttcccat

SEQ ID NO: 1272 - RNA, 21 nt, synthetic construct
  source 1..21: mol_type = other RNA
  modified_base 1: mod_base = OTHER; note 5'-(E)-vinylphosphonate-2'-O-methyladenosine-3'-phosphoroth ioate
  modified_base 2: mod_base = OTHER; note = 2'-fluorouridine-3'-phosphorothioate
  modified_base 3: mod_base = OTHER; note = 2'-O-methylguanosine-3'-phosphate
  modified_base 4: mod_base = OTHER; note = 2'-fluoroguanosine-3'-phosphate
  modified_base 5: mod_base = OTHER; note = 2'-O-methylguanosine-3'-phosphate
  modified_base 6: mod_base = OTHER; note = 2'-fluoroadenosine-3'-phosphate
  modified_base 7: mod_base = OTHER; note = 2'-O-methyladenosine-3'-phosphate
  modified_base 8: mod_base = OTHER; note = 2'-fluoroguanosine-3'-phosphate
  modified_base 9: mod_base = OTHER; note = 2'-O-methylguanosine-3'-phosphate
  modified_base 10: mod_base = OTHER; note = 2'-fluorouridine-3'-phosphate
  modified_base 11: mod_base = OTHER; note = 2'-O-methylguanosine-3'-phosphate
  modified_base 12: mod_base = OTHER; note = 2'-fluoroguanosine-3'-phosphate
  modified_base 13: mod_base = OTHER; note = 2'-O-methyladenosine-3'-phosphate
  modified_base 14: mod_base = OTHER; note = 2'-fluorouridine-3'-phosphate
  modified_base 15: mod_base = OTHER; note = 2'-O-methylcytidine-3'-phosphate
  modified_base 16: mod_base = OTHER; note = 2'-fluorocytidine-3'-phosphate
  modified_base 17: mod_base = OTHER; note = 2'-O-methylguanosine-3'-phosphate
  modified_base 18: mod_base = OTHER; note = 2'-fluorouridine-3'-phosphate
  modified_base 19: mod_base = OTHER; note = 2'-O-methylguanosine-3'-phosphorothioate
  modified_base 20: mod_base = OTHER; note = 2'-O-methylguanosine-3'-phosphorothioate
  modified_base 21: mod_base = OTHER; note = 2'-O-methylcytidine
atgggaaggtggatccgtggc

SEQ ID NO: 1273 - RNA, 19 nt, synthetic construct
  source 1..19: mol_type = other RNA
  modified_base 1: mod_base = OTHER; note = 2'-fluorouridine-3'-phosphorothioate
  modified_base 2: mod_base = OTHER; note = 2'-O-methylcytidine-3'-phosphorothioate
  modified_base 3: mod_base = OTHER; note = 2'-fluoroguanosine-3'-phosphate
  modified_base 4: mod_base = OTHER; note = 2'-O-methylguanosine-3'-phosphate
  modified_base 5: mod_base = OTHER; note = 2'-fluorouridine-3'-phosphate
  modified_base 6: mod_base = OTHER; note = 2'-O-methyladenosine-3'-phosphate
  modified_base 7: mod_base = OTHER; note = 2'-fluorouridine-3'-phosphate
  modified_base 8: mod_base = OTHER; note = 2'-O-methyluridine-3'-phosphate
  modified_base 9: mod_base = OTHER; note = 2'-fluorouridine-3'-phosphate
  modified_base 10: mod_base = OTHER; note = 2'-O-methyladenosine-3'-phosphate
  modified_base 11: mod_base = OTHER; note = 2'-fluorouridine-3'-phosphate
  modified_base 12: mod_base = OTHER; note = 2'-O-methyluridine-3'-phosphate
  modified_base 13: mod_base = OTHER; note = 2'-fluoroguanosine-3'-phosphate
  modified_base 14: mod_base = OTHER; note = 2'-O-methyluridine-3'-phosphate
  modified_base 15: mod_base = OTHER; note = 2'-fluorocytidine-3'-phosphate
  modified_base 16: mod_base = OTHER; note = 2'-O-methyluridine-3'-phosphate
  modified_base 17: mod_base = OTHER; note = 2'-fluoroguanosine-3'-phosphorothioate
  modified_base 18: mod_base = OTHER; note = 2'-O-methyluridine-3'-phosphorothioate
  modified_base 19: mod_base = OTHER; note 2'-fluorouridine-3'-phosphate-N,N'-((5S)-6-((6-hydroxy-5-(l ambda-3-methyl)hexyl)amino)-6-oxohexane-1,5-diyl)ditetradec anamide
tcggtatttattgtctgtt

SEQ ID NO: 1274 - RNA, 21 nt, synthetic construct
  source 1..21: mol_type = other RNA
  modified_base 1: mod_base = OTHER; note 5'-(E)-vinylphosphonate-2'-O-methyladenosine-3'-phosphoroth ioate
  modified_base 2: mod_base = OTHER; note = 2'-fluoroadenosine-3'-phosphorothioate
  modified_base 3: mod_base = OTHER; note = 2'-O-methylcytidine-3'-phosphate
  modified_base 4: mod_base = OTHER; note = 2'-fluoroadenosine-3'-phosphate
  modified_base 5: mod_base = OTHER; note = 2'-O-methylguanosine-3'-phosphate
  modified_base 6: mod_base = OTHER; note = 2'-fluoroadenosine-3'-phosphate
  modified_base 7: mod_base = OTHER; note = 2'-O-methylcytidine-3'-phosphate
  modified_base 8: mod_base = OTHER; note = 2'-fluoroadenosine-3'-phosphate
  modified_base 9: mod_base = OTHER; note = 2'-O-methyladenosine-3'-phosphate
  modified_base 10: mod_base = OTHER; note = 2'-fluorouridine-3'-phosphate
  modified_base 11: mod_base = OTHER; note = 2'-O-methyladenosine-3'-phosphate
  modified_base 12: mod_base = OTHER; note = 2'-fluoroadenosine-3'-phosphate
  modified_base 13: mod_base = OTHER; note = 2'-O-methyladenosine-3'-phosphate
  modified_base 14: mod_base = OTHER; note = 2'-fluorouridine-3'-phosphate
  modified_base 15: mod_base = OTHER; note = 2'-O-methyladenosine-3'-phosphate
  modified_base 16: mod_base = OTHER; note = 2'-fluorocytidine-3'-phosphate
  modified_base 17: mod_base = OTHER; note = 2'-O-methylcytidine-3'-phosphate
  modified_base 18: mod_base = OTHER; note = 2'-fluoroguanosine-3'-phosphate
  modified_base 19: mod_base = OTHER; note = 2'-O-methyladenosine-3'-phosphorothioate
  modified_base 20: mod_base = OTHER; note = 2'-O-methylguanosine-3'-phosphorothioate
  modified_base 21: mod_base = OTHER; note = 2'-O-methylguanosine
aacagacaataaataccgagg

SEQ ID NO: 1275 - RNA, 19 nt, synthetic construct
  source 1..19: mol_type = other RNA
  modified_base 1: mod_base = OTHER; note = 2'-fluorocytidine-3'-phosphorothioate
  modified_base 2: mod_base = OTHER; note = 2'-O-methylcytidine-3'-phosphorothioate
  modified_base 3: mod_base = OTHER; note = 2'-fluoroadenosine-3'-phosphate
  modified_base 4: mod_base = OTHER; note = 2'-O-methyluridine-3'-phosphate
  modified_base 5: mod_base = OTHER; note = 2'-fluorocytidine-3'-phosphate
  modified_base 6: mod_base = OTHER; note = 2'-O-methylguanosine-3'-phosphate
  modified_base 7: mod_base = OTHER; note = 2'-fluorouridine-3'-phosphate
  modified_base 8: mod_base = OTHER; note = 2'-O-methylguanosine-3'-phosphate
  modified_base 9: mod_base = OTHER; note = 2'-fluoroguanosine-3'-phosphate
  modified_base 10: mod_base = OTHER; note = 2'-O-methyluridine-3'-phosphate
  modified_base 11: mod_base = OTHER; note = 2'-fluoroguanosine-3'-phosphate
  modified_base 12: mod_base = OTHER; note = 2'-O-methyladenosine-3'-phosphate
  modified_base 13: mod_base = OTHER; note = 2'-fluoroguanosine-3'-phosphate
  modified_base 14: mod_base = OTHER; note = 2'-O-methylguanosine-3'-phosphate
  modified_base 15: mod_base = OTHER; note = 2'-fluorocytidine-3'-phosphate
  modified_base 16: mod_base = OTHER; note = 2'-O-methyluridine-3'-phosphate
  modified_base 17: mod_base = OTHER; note = 2'-fluorouridine-3'-phosphorothioate
  modified_base 18: mod_base = OTHER; note = 2'-O-methyladenosine-3'-phosphorothioate
  modified_base 19: mod_base = OTHER; note 2'-fluoroadenosine-3'-phosphate-N,N'-((5S)-6-((6-hydroxy-5- (lambda-3-methyl)hexyl)amino)-6-oxohexane-1,5-diyl)ditetrad ecanamide
ccatcgtggtgaggcttaa

SEQ ID NO: 1276 - RNA, 21 nt, synthetic construct
  source 1..21: mol_type = other RNA
  modified_base 1: mod_base = OTHER; note 5'-(E)-vinylphosphonate-2'-O-methyluridine-3'-phosphorothio ate
  modified_base 2: mod_base = OTHER; note = 2'-fluorouridine-3'-phosphorothioate
  modified_base 3: mod_base = OTHER; note = 2'-O-methyladenosine-3'-phosphate
  modified_base 4: mod_base = OTHER; note = 2'-fluoroadenosine-3'-phosphate
  modified_base 5: mod_base = OTHER; note = 2'-O-methylguanosine-3'-phosphate
  modified_base 6: mod_base = OTHER; note = 2'-fluorocytidine-3'-phosphate
  modified_base 7: mod_base = OTHER; note = 2'-O-methylcytidine-3'-phosphate
  modified_base 8: mod_base = OTHER; note = 2'-fluorouridine-3'-phosphate
  modified_base 9: mod_base = OTHER; note = 2'-O-methylcytidine-3'-phosphate
  modified_base 10: mod_base = OTHER; note = 2'-fluoroadenosine-3'-phosphate
  modified_base 11: mod_base = OTHER; note = 2'-O-methylcytidine-3'-phosphate
  modified_base 12: mod_base = OTHER; note = 2'-fluorocytidine-3'-phosphate
  modified_base 13: mod_base = OTHER; note = 2'-O-methyladenosine-3'-phosphate
  modified_base 14: mod_base = OTHER; note = 2'-fluorocytidine-3'-phosphate
  modified_base 15: mod_base = OTHER; note = 2'-O-methylguanosine-3'-phosphate
  modified_base 16: mod_base = OTHER; note = 2'-fluoroadenosine-3'-phosphate
  modified_base 17: mod_base = OTHER; note = 2'-O-methyluridine-3'-phosphate
  modified_base 18: mod_base = OTHER; note = 2'-fluoroguanosine-3'-phosphate
  modified_base 19: mod_base = OTHER; note = 2'-O-methylguanosine-3'-phosphorothioate
  modified_base 20: mod_base = OTHER; note = 2'-O-methylguanosine-3'-phosphorothioate
  modified_base 21: mod_base = OTHER; note = 2'-O-methylcytidine
ttaagcctcaccacgatgggc

SEQ ID NO: 1277 - RNA, 19 nt, synthetic construct
  source 1..19: mol_type = other RNA
  modified_base 1: mod_base = OTHER; note = 2'-fluoroguanosine-3'-phosphorothioate
  modified_base 2: mod_base = OTHER; note = 2'-O-methylguanosine-3'-phosphorothioate
  modified_base 3: mod_base = OTHER; note = 2'-fluoroadenosine-3'-phosphate
  modified_base 4: mod_base = OTHER; note = 2'-O-methylcytidine-3'-phosphate
  modified_base 5: mod_base = OTHER; note = 2'-fluoroguanosine-3'-phosphate
  modified_base 6: mod_base = OTHER; note = 2'-O-methyladenosine-3'-phosphate
  modified_base 7: mod_base = OTHER; note = 2'-fluorocytidine-3'-phosphate
  modified_base 8: mod_base = OTHER; note = 2'-O-methyluridine-3'-phosphate
  modified_base 9: mod_base = OTHER; note = 2'-fluorouridine-3'-phosphate
  modified_base 10: mod_base = OTHER; note = 2'-O-methylcytidine-3'-phosphate
  modified_base 11: mod_base = OTHER; note = 2'-fluoroguanosine-3'-phosphate
  modified_base 12: mod_base = OTHER; note = 2'-O-methyladenosine-3'-phosphate
  modified_base 13: mod_base = OTHER; note = 2'-fluoroguanosine-3'-phosphate
  modified_base 14: mod_base = OTHER; note = 2'-O-methyladenosine-3'-phosphate
  modified_base 15: mod_base = OTHER; note = 2'-fluorouridine-3'-phosphate
  modified_base 16: mod_base = OTHER; note = 2'-O-methyluridine-3'-phosphate
  modified_base 17: mod_base = OTHER; note = 2'-fluorocytidine-3'-phosphorothioate
  modified_base 18: mod_base = OTHER; note = 2'-O-methyluridine-3'-phosphorothioate
  modified_base 19: mod_base = OTHER; note 2'-fluorouridine-3'-phosphate-N,N'-((5S)-6-((6-hydroxy-5-(l ambda-3-methyl)hexyl)amino)-6-oxohexane-1,5-diyl)ditetradec anamide
ggacgacttcgagattctt

SEQ ID NO: 1278 - RNA, 21 nt, synthetic construct
  source 1..21: mol_type = other RNA
  modified_base 1: mod_base = OTHER; note 5'-(E)-vinylphosphonate-2'-O-methyladenosine-3'-phosphoroth ioate
  modified_base 2: mod_base = OTHER; note = 2'-fluoroadenosine-3'-phosphorothioate
  modified_base 3: mod_base = OTHER; note = 2'-O-methylguanosine-3'-phosphate
  modified_base 4: mod_base = OTHER; note = 2'-fluoroadenosine-3'-phosphate
  modified_base 5: mod_base = OTHER; note = 2'-O-methyladenosine-3'-phosphate
  modified_base 6: mod_base = OTHER; note = 2'-fluorouridine-3'-phosphate
  modified_base 7: mod_base = OTHER; note = 2'-O-methylcytidine-3'-phosphate
  modified_base 8: mod_base = OTHER; note = 2'-fluorouridine-3'-phosphate
  modified_base 9: mod_base = OTHER; note = 2'-O-methylcytidine-3'-phosphate
  modified_base 10: mod_base = OTHER; note = 2'-fluoroguanosine-3'-phosphate
  modified_base 11: mod_base = OTHER; note = 2'-O-methyladenosine-3'-phosphate
  modified_base 12: mod_base = OTHER; note = 2'-fluoroadenosine-3'-phosphate
  modified_base 13: mod_base = OTHER; note = 2'-O-methylguanosine-3'-phosphate
  modified_base 14: mod_base = OTHER; note = 2'-fluorouridine-3'-phosphate
  modified_base 15: mod_base = OTHER; note = 2'-O-methylcytidine-3'-phosphate
  modified_base 16: mod_base = OTHER; note = 2'-fluoroguanosine-3'-phosphate
  modified_base 17: mod_base = OTHER; note = 2'-O-methyluridine-3'-phosphate
  modified_base 18: mod_base = OTHER; note = 2'-fluorocytidine-3'-phosphate
  modified_base 19: mod_base = OTHER; note = 2'-O-methylcytidine-3'-phosphorothioate
  modified_base 20: mod_base = OTHER; note = 2'-O-methylcytidine-3'-phosphorothioate
  modified_base 21: mod_base = OTHER; note = 2'-O-methyluridine
aagaatctcgaagtcgtccct

SEQ ID NO: 1279 - RNA, 19 nt, synthetic construct
  source 1..19: mol_type = other RNA
  modified_base 1: mod_base = OTHER; note = 2'-fluorouridine-3'-phosphorothioate
  modified_base 2: mod_base = OTHER; note = 2'-O-methylguanosine-3'-phosphorothioate
  modified_base 3: mod_base = OTHER; note = 2'-fluoroadenosine-3'-phosphate
  modified_base 4: mod_base = OTHER; note = 2'-O-methyladenosine-3'-phosphate
  modified_base 5: mod_base = OTHER; note = 2'-fluoroguanosine-3'-phosphate
  modified_base 6: mod_base = OTHER; note = 2'-O-methyladenosine-3'-phosphate
  modified_base 7: mod_base = OTHER; note = 2'-fluorouridine-3'-phosphate
  modified_base 8: mod_base = OTHER; note = 2'-O-methylcytidine-3'-phosphate
  modified_base 9: mod_base = OTHER; note = 2'-fluoroadenosine-3'-phosphate
  modified_base 10: mod_base = OTHER; note = 2'-O-methyluridine-3'-phosphate
  modified_base 11: mod_base = OTHER; note = 2'-fluoroguanosine-3'-phosphate
  modified_base 12: mod_base = OTHER; note = 2'-O-methyladenosine-3'-phosphate
  modified_base 13: mod_base = OTHER; note = 2'-fluoroadenosine-3'-phosphate
  modified_base 14: mod_base = OTHER; note = 2'-O-methylcytidine-3'-phosphate
  modified_base 15: mod_base = OTHER; note = 2'-fluoroadenosine-3'-phosphate
  modified_base 16: mod_base = OTHER; note = 2'-O-methyladenosine-3'-phosphate
  modified_base 17: mod_base = OTHER; note = 2'-fluoroguanosine-3'-phosphorothioate
  modified_base 18: mod_base = OTHER; note = 2'-O-methyluridine-3'-phosphorothioate
  modified_base 19: mod_base = OTHER; note 2'-fluorouridine-3'-phosphate-N,N'-((5S)-6-((6-hydroxy-5-(l ambda-3-methyl)hexyl)amino)-6-oxohexane-1,5-diyl)ditetradec anamide
tgaagatcatgaacaagtt

SEQ ID NO: 1280 - RNA, 21 nt, synthetic construct
  source 1..21: mol_type = other RNA
  modified_base 1: mod_base = OTHER; note 5'-(E)-vinylphosphonate-2'-O-methyladenosine-3'-phosphoroth ioate
  modified_base 2: mod_base = OTHER; note = 2'-fluoroadenosine-3'-phosphorothioate
  modified_base 3: mod_base = OTHER; note = 2'-O-methylcytidine-3'-phosphate
  modified_base 4: mod_base = OTHER; note = 2'-fluorouridine-3'-phosphate
  modified_base 5: mod_base = OTHER; note = 2'-O-methyluridine-3'-phosphate
  modified_base 6: mod_base = OTHER; note = 2'-fluoroguanosine-3'-phosphate
  modified_base 7: mod_base = OTHER; note = 2'-O-methyluridine-3'-phosphate
  modified_base 8: mod_base = OTHER; note = 2'-fluorouridine-3'-phosphate
  modified_base 9: mod_base = OTHER; note = 2'-O-methylcytidine-3'-phosphate
  modified_base 10: mod_base = OTHER; note = 2'-fluoroadenosine-3'-phosphate
  modified_base 11: mod_base = OTHER; note = 2'-O-methyluridine-3'-phosphate
  modified_base 12: mod_base = OTHER; note = 2'-fluoroguanosine-3'-phosphate
  modified_base 13: mod_base = OTHER; note = 2'-O-methyladenosine-3'-phosphate
  modified_base 14: mod_base = OTHER; note = 2'-fluorouridine-3'-phosphate
  modified_base 15: mod_base = OTHER; note = 2'-O-methylcytidine-3'-phosphate
  modified_base 16: mod_base = OTHER; note = 2'-fluorouridine-3'-phosphate
  modified_base 17: mod_base = OTHER; note = 2'-O-methyluridine-3'-phosphate
  modified_base 18: mod_base = OTHER; note = 2'-fluorocytidine-3'-phosphate
  modified_base 19: mod_base = OTHER; note = 2'-O-methyladenosine-3'-phosphorothioate
  modified_base 20: mod_base = OTHER; note = 2'-O-methyluridine-3'-phosphorothioate
  modified_base 21: mod_base = OTHER; note = 2'-O-methylguanosine
aacttgttcatgatcttcatg

SEQ ID NO: 1281 - RNA, 19 nt, synthetic construct
  source 1..19: mol_type = other RNA
  modified_base 1: mod_base = OTHER; note = 2'-fluoroguanosine-3'-phosphorothioate
  modified_base 2: mod_base = OTHER; note = 2'-O-methyladenosine-3'-phosphorothioate
  modified_base 3: mod_base = OTHER; note = 2'-fluoroguanosine-3'-phosphate
  modified_base 4: mod_base = OTHER; note = 2'-O-methylguanosine-3'-phosphate
  modified_base 5: mod_base = OTHER; note = 2'-fluorouridine-3'-phosphate
  modified_base 6: mod_base = OTHER; note = 2'-O-methylguanosine-3'-phosphate
  modified_base 7: mod_base = OTHER; note = 2'-fluorouridine-3'-phosphate
  modified_base 8: mod_base = OTHER; note = 2'-O-methylcytidine-3'-phosphate
  modified_base 9: mod_base = OTHER; note = 2'-fluoroguanosine-3'-phosphate
  modified_base 10: mod_base = OTHER; note = 2'-O-methyluridine-3'-phosphate
  modified_base 11: mod_base = OTHER; note = 2'-fluoroguanosine-3'-phosphate
  modified_base 12: mod_base = OTHER; note = 2'-O-methylcytidine-3'-phosphate
  modified_base 13: mod_base = OTHER; note = 2'-fluorouridine-3'-phosphate
  modified_base 14: mod_base = OTHER; note = 2'-O-methyluridine-3'-phosphate
  modified_base 15: mod_base = OTHER; note = 2'-fluorocytidine-3'-phosphate
  modified_base 16: mod_base = OTHER; note = 2'-O-methylcytidine-3'-phosphate
  modified_base 17: mod_base = OTHER; note = 2'-fluoroguanosine-3'-phosphorothioate
  modified_base 18: mod_base = OTHER; note = 2'-O-methyluridine-3'-phosphorothioate
  modified_base 19: mod_base = OTHER; note 2'-fluorouridine-3'-phosphate-N,N'-((5S)-6-((6-hydroxy-5-(l ambda-3-methyl)hexyl)amino)-6-oxohexane-1,5-diyl)ditetradec anamide
gaggtgtcgtgcttccgtt

SEQ ID NO: 1282 - RNA, 21 nt, synthetic construct
  source 1..21: mol_type = other RNA
  modified_base 1: mod_base = OTHER; note 5'-(E)-vinylphosphonate-2'-O-methyladenosine-3'-phosphoroth ioate
  modified_base 2: mod_base = OTHER; note = 2'-fluoroadenosine-3'-phosphorothioate
  modified_base 3: mod_base = OTHER; note = 2'-O-methylcytidine-3'-phosphate
  modified_base 4: mod_base = OTHER; note = 2'-fluoroguanosine-3'-phosphate
  modified_base 5: mod_base = OTHER; note = 2'-O-methylguanosine-3'-phosphate
  modified_base 6: mod_base = OTHER; note = 2'-fluoroadenosine-3'-phosphate
  modified_base 7: mod_base = OTHER; note = 2'-O-methyladenosine-3'-phosphate
  modified_base 8: mod_base = OTHER; note = 2'-fluoroguanosine-3'-phosphate
  modified_base 9: mod_base = OTHER; note = 2'-O-methylcytidine-3'-phosphate
  modified_base 10: mod_base = OTHER; note = 2'-fluoroadenosine-3'-phosphate
  modified_base 11: mod_base = OTHER; note = 2'-O-methylcytidine-3'-phosphate
  modified_base 12: mod_base = OTHER; note = 2'-fluoroguanosine-3'-phosphate
  modified_base 13: mod_base = OTHER; note = 2'-O-methyladenosine-3'-phosphate
  modified_base 14: mod_base = OTHER; note = 2'-fluorocytidine-3'-phosphate
  modified_base 15: mod_base = OTHER; note = 2'-O-methyladenosine-3'-phosphate
  modified_base 16: mod_base = OTHER; note = 2'-fluorocytidine-3'-phosphate
  modified_base 17: mod_base = OTHER; note = 2'-O-methylcytidine-3'-phosphate
  modified_base 18: mod_base = OTHER; note = 2'-fluorouridine-3'-phosphate
  modified_base 19: mod_base = OTHER; note = 2'-O-methylcytidine-3'-phosphorothioate
  modified_base 20: mod_base = OTHER; note = 2'-O-methylguanosine-3'-phosphorothioate
  modified_base 21: mod_base = OTHER; note = 2'-O-methylcytidine
aacggaagcacgacacctcgc

SEQ ID NO: 1283 - RNA, 19 nt, synthetic construct
  source 1..19: mol_type = other RNA
  modified_base 1: mod_base = OTHER; note = 2'-fluoroguanosine-3'-phosphorothioate
  modified_base 2: mod_base = OTHER; note = 2'-O-methylguanosine-3'-phosphorothioate
  modified_base 3: mod_base = OTHER; note = 2'-fluorouridine-3'-phosphate
  modified_base 4: mod_base = OTHER; note = 2'-O-methylcytidine-3'-phosphate
  modified_base 5: mod_base = OTHER; note = 2'-fluoroadenosine-3'-phosphate
  modified_base 6: mod_base = OTHER; note = 2'-O-methyluridine-3'-phosphate
  modified_base 7: mod_base = OTHER; note = 2'-fluoroguanosine-3'-phosphate
  modified_base 8: mod_base = OTHER; note = 2'-O-methylguanosine-3'-phosphate
  modified_base 9: mod_base = OTHER; note = 2'-fluoroadenosine-3'-phosphate
  modified_base 10: mod_base = OTHER; note = 2'-O-methylguanosine-3'-phosphate
  modified_base 11: mod_base = OTHER; note = 2'-fluorouridine-3'-phosphate
  modified_base 12: mod_base = OTHER; note = 2'-O-methyladenosine-3'-phosphate
  modified_base 13: mod_base = OTHER; note = 2'-fluorouridine-3'-phosphate
  modified_base 14: mod_base = OTHER; note = 2'-O-methyluridine-3'-phosphate
  modified_base 15: mod_base = OTHER; note = 2'-fluoroadenosine-3'-phosphate
  modified_base 16: mod_base = OTHER; note = 2'-O-methylcytidine-3'-phosphate
  modified_base 17: mod_base = OTHER; note = 2'-fluoroguanosine-3'-phosphorothioate
  modified_base 18: mod_base = OTHER; note = 2'-O-methyluridine-3'-phosphorothioate
  modified_base 19: mod_base = OTHER; note 2'-fluorouridine-3'-phosphate-N,N'-((5S)-6-((6-hydroxy-5-(l ambda-3-methyl)hexyl)amino)-6-oxohexane-1,5-diyl)ditetradec anamide
ggtcatggagtattacgtt

SEQ ID NO: 1284 - RNA, 21 nt, synthetic construct
  source 1..21: mol_type = other RNA
  modified_base 1: mod_base = OTHER; note 5'-(E)-vinylphosphonate-2'-O-methyladenosine-3'-phosphoroth ioate
  modified_base 2: mod_base = OTHER; note = 2'-fluoroadenosine-3'-phosphorothioate
  modified_base 3: mod_base = OTHER; note = 2'-O-methylcytidine-3'-phosphate
  modified_base 4: mod_base = OTHER; note = 2'-fluoroguanosine-3'-phosphate
  modified_base 5: mod_base = OTHER; note = 2'-O-methyluridine-3'-phosphate
  modified_base 6: mod_base = OTHER; note = 2'-fluoroadenosine-3'-phosphate
  modified_base 7: mod_base = OTHER; note = 2'-O-methyladenosine-3'-phosphate
  modified_base 8: mod_base = OTHER; note = 2'-fluorouridine-3'-phosphate
  modified_base 9: mod_base = OTHER; note = 2'-O-methyladenosine-3'-phosphate
  modified_base 10: mod_base = OTHER; note = 2'-fluorocytidine-3'-phosphate
  modified_base 11: mod_base = OTHER; note = 2'-O-methyluridine-3'-phosphate
  modified_base 12: mod_base = OTHER; note = 2'-fluorocytidine-3'-phosphate
  modified_base 13: mod_base = OTHER; note = 2'-O-methylcytidine-3'-phosphate
  modified_base 14: mod_base = OTHER; note = 2'-fluoroadenosine-3'-phosphate
  modified_base 15: mod_base = OTHER; note = 2'-O-methyluridine-3'-phosphate
  modified_base 16: mod_base = OTHER; note = 2'-fluoroguanosine-3'-phosphate
  modified_base 17: mod_base = OTHER; note = 2'-O-methyladenosine-3'-phosphate
  modified_base 18: mod_base = OTHER; note = 2'-fluorocytidine-3'-phosphate
  modified_base 19: mod_base = OTHER; note = 2'-O-methylcytidine-3'-phosphorothioate
  modified_base 20: mod_base = OTHER; note = 2'-O-methyladenosine-3'-phosphorothioate
  modified_base 21: mod_base = OTHER; note = 2'-O-methylguanosine
aacgtaatactccatgaccag

SEQ ID NO: 1285 - RNA, 19 nt, synthetic construct
  source 1..19: mol_type = other RNA
  modified_base 1: mod_base = OTHER; note = 2'-fluorocytidine-3'-phosphorothioate
  modified_base 2: mod_base = OTHER; note = 2'-O-methylcytidine-3'-phosphorothioate
  modified_base 3: mod_base = OTHER; note = 2'-fluoroadenosine-3'-phosphate
  modified_base 4: mod_base = OTHER; note = 2'-O-methylguanosine-3'-phosphate
  modified_base 5: mod_base = OTHER; note = 2'-fluoroguanosine-3'-phosphate
  modified_base 6: mod_base = OTHER; note = 2'-O-methyladenosine-3'-phosphate
  modified_base 7: mod_base = OTHER; note = 2'-fluorouridine-3'-phosphate
  modified_base 8: mod_base = OTHER; note = 2'-O-methylguanosine-3'-phosphate
  modified_base 9: mod_base = OTHER; note = 2'-fluoroadenosine-3'-phosphate
  modified_base 10: mod_base = OTHER; note = 2'-O-methylguanosine-3'-phosphate
  modified_base 11: mod_base = OTHER; note = 2'-fluoroadenosine-3'-phosphate
  modified_base 12: mod_base = OTHER; note = 2'-O-methyladenosine-3'-phosphate
  modified_base 13: mod_base = OTHER; note = 2'-fluorocytidine-3'-phosphate
  modified_base 14: mod_base = OTHER; note = 2'-O-methyluridine-3'-phosphate
  modified_base 15: mod_base = OTHER; note = 2'-fluoroadenosine-3'-phosphate
  modified_base 16: mod_base = OTHER; note = 2'-O-methylcytidine-3'-phosphate
  modified_base 17: mod_base = OTHER; note = 2'-fluorocytidine-3'-phosphorothioate
  modified_base 18: mod_base = OTHER; note = 2'-O-methyluridine-3'-phosphorothioate
  modified_base 19: mod_base = OTHER; note 2'-fluoroadenosine-3'-phosphate-N,N'-((5S)-6-((6-hydroxy-5- (lambda-3-methyl)hexyl)amino)-6-oxohexane-1,5-diyl)ditetrad ecanamide
ccaggatgagaactaccta

SEQ ID NO: 1286 - RNA, 21 nt, synthetic construct
  source 1..21: mol_type = other RNA
  modified_base 1: mod_base = OTHER; note 5'-(E)-vinylphosphonate-2'-O-methyluridine-3'-phosphorothio ate
  modified_base 2: mod_base = OTHER; note = 2'-fluoroadenosine-3'-phosphorothioate
  modified_base 3: mod_base = OTHER; note = 2'-O-methylguanosine-3'-phosphate
  modified_base 4: mod_base = OTHER; note = 2'-fluoroguanosine-3'-phosphate
  modified_base 5: mod_base = OTHER; note = 2'-O-methyluridine-3'-phosphate
  modified_base 6: mod_base = OTHER; note = 2'-fluoroadenosine-3'-phosphate
  modified_base 7: mod_base = OTHER; note = 2'-O-methylguanosine-3'-phosphate
  modified_base 8: mod_base = OTHER; note = 2'-fluorouridine-3'-phosphate
  modified_base 9: mod_base = OTHER; note = 2'-O-methyluridine-3'-phosphate
  modified_base 10: mod_base = OTHER; note = 2'-fluorocytidine-3'-phosphate
  modified_base 11: mod_base = OTHER; note = 2'-O-methyluridine-3'-phosphate
  modified_base 12: mod_base = OTHER; note = 2'-fluorocytidine-3'-phosphate
  modified_base 13: mod_base = OTHER; note = 2'-O-methyladenosine-3'-phosphate
  modified_base 14: mod_base = OTHER; note = 2'-fluorouridine-3'-phosphate
  modified_base 15: mod_base = OTHER; note = 2'-O-methylcytidine-3'-phosphate
  modified_base 16: mod_base = OTHER; note = 2'-fluorocytidine-3'-phosphate
  modified_base 17: mod_base = OTHER; note = 2'-O-methyluridine-3'-phosphate
  modified_base 18: mod_base = OTHER; note = 2'-fluoroguanosine-3'-phosphate
  modified_base 19: mod_base = OTHER; note = 2'-O-methylguanosine-3'-phosphorothioate
  modified_base 20: mod_base = OTHER; note = 2'-O-methyladenosine-3'-phosphorothioate
  modified_base 21: mod_base = OTHER; note = 2'-O-methyladenosine
taggtagttctcatcctggaa

SEQ ID NO: 1287 - RNA, 19 nt, synthetic construct
  source 1..19: mol_type = other RNA
  modified_base 1: mod_base = OTHER; note = 2'-fluorocytidine-3'-phosphorothioate
  modified_base 2: mod_base = OTHER; note = 2'-O-methylguanosine-3'-phosphorothioate
  modified_base 3: mod_base = OTHER; note = 2'-fluoroguanosine-3'-phosphate
  modified_base 4: mod_base = OTHER; note = 2'-O-methyluridine-3'-phosphate
  modified_base 5: mod_base = OTHER; note = 2'-fluoroadenosine-3'-phosphate
  modified_base 6: mod_base = OTHER; note = 2'-O-methyluridine-3'-phosphate
  modified_base 7: mod_base = OTHER; note = 2'-fluorouridine-3'-phosphate
  modified_base 8: mod_base = OTHER; note = 2'-O-methyluridine-3'-phosphate
  modified_base 9: mod_base = OTHER; note = 2'-fluoroadenosine-3'-phosphate
  modified_base 10: mod_base = OTHER; note = 2'-O-methyluridine-3'-phosphate
  modified_base 11: mod_base = OTHER; note = 2'-fluorouridine-3'-phosphate
  modified_base 12: mod_base = OTHER; note = 2'-O-methylguanosine-3'-phosphate
  modified_base 13: mod_base = OTHER; note = 2'-fluorouridine-3'-phosphate
  modified_base 14: mod_base = OTHER; note = 2'-O-methylcytidine-3'-phosphate
  modified_base 15: mod_base = OTHER; note = 2'-fluorouridine-3'-phosphate
  modified_base 16: mod_base = OTHER; note = 2'-O-methylguanosine-3'-phosphate
  modified_base 17: mod_base = OTHER; note = 2'-fluorouridine-3'-phosphorothioate
  modified_base 18: mod_base = OTHER; note = 2'-O-methylcytidine-3'-phosphorothioate
  modified_base 19: mod_base = OTHER; note 2'-fluorouridine-3'-phosphate-N,N'-((5S)-6-((6-hydroxy-5-(l ambda-3-methyl)hexyl)amino)-6-oxohexane-1,5-diyl)ditetradec anamide
cggtatttattgtctgtct

SEQ ID NO: 1288 - RNA, 21 nt, synthetic construct
  source 1..21: mol_type = other RNA
  modified_base 1: mod_base = OTHER; note 5'-(E)-vinylphosphonate-2'-O-methyladenosine-3'-phosphoroth ioate
  modified_base 2: mod_base = OTHER; note = 2'-fluoroguanosine-3'-phosphorothioate
  modified_base 3: mod_base = OTHER; note = 2'-O-methyladenosine-3'-phosphate
  modified_base 4: mod_base = OTHER; note = 2'-fluorocytidine-3'-phosphate
  modified_base 5: mod_base = OTHER; note = 2'-O-methyladenosine-3'-phosphate
  modified_base 6: mod_base = OTHER; note = 2'-fluoroguanosine-3'-phosphate
  modified_base 7: mod_base = OTHER; note = 2'-O-methyladenosine-3'-phosphate
  modified_base 8: mod_base = OTHER; note = 2'-fluorocytidine-3'-phosphate
  modified_base 9: mod_base = OTHER; note = 2'-O-methyladenosine-3'-phosphate
  modified_base 10: mod_base = OTHER; note = 2'-fluoroadenosine-3'-phosphate
  modified_base 11: mod_base = OTHER; note = 2'-O-methyluridine-3'-phosphate
  modified_base 12: mod_base = OTHER; note = 2'-fluoroadenosine-3'-phosphate
  modified_base 13: mod_base = OTHER; note = 2'-O-methyladenosine-3'-phosphate
  modified_base 14: mod_base = OTHER; note = 2'-fluoroadenosine-3'-phosphate
  modified_base 15: mod_base = OTHER; note = 2'-O-methyluridine-3'-phosphate
  modified_base 16: mod_base = OTHER; note = 2'-fluoroadenosine-3'-phosphate
  modified_base 17: mod_base = OTHER; note = 2'-O-methylcytidine-3'-phosphate
  modified_base 18: mod_base = OTHER; note = 2'-fluorocytidine-3'-phosphate
  modified_base 19: mod_base = OTHER; note = 2'-O-methylguanosine-3'-phosphorothioate
  modified_base 20: mod_base = OTHER; note = 2'-O-methyladenosine-3'-phosphorothioate
  modified_base 21: mod_base = OTHER; note = 2'-O-methylguanosine
agacagacaataaataccgag

SEQ ID NO: 1289 - RNA, 19 nt, synthetic construct
  source 1..19: mol_type = other RNA
  modified_base 1: mod_base = OTHER; note = 2'-fluorocytidine-3'-phosphorothioate
  modified_base 2: mod_base = OTHER; note = 2'-O-methyladenosine-3'-phosphorothioate
  modified_base 3: mod_base = OTHER; note = 2'-fluorouridine-3'-phosphate
  modified_base 4: mod_base = OTHER; note = 2'-O-methylguanosine-3'-phosphate
  modified_base 5: mod_base = OTHER; note = 2'-fluoroadenosine-3'-phosphate
  modified_base 6: mod_base = OTHER; note = 2'-O-methyladenosine-3'-phosphate
  modified_base 7: mod_base = OTHER; note = 2'-fluoroguanosine-3'-phosphate
  modified_base 8: mod_base = OTHER; note = 2'-O-methyladenosine-3'-phosphate
  modified_base 9: mod_base = OTHER; note = 2'-fluorouridine-3'-phosphate
  modified_base 10: mod_base = OTHER; note = 2'-O-methylcytidine-3'-phosphate
  modified_base 11: mod_base = OTHER; note = 2'-fluoroadenosine-3'-phosphate
  modified_base 12: mod_base = OTHER; note = 2'-O-methyluridine-3'-phosphate
  modified_base 13: mod_base = OTHER; note = 2'-fluoroguanosine-3'-phosphate
  modified_base 14: mod_base = OTHER; note = 2'-O-methyladenosine-3'-phosphate
  modified_base 15: mod_base = OTHER; note = 2'-fluoroadenosine-3'-phosphate
  modified_base 16: mod_base = OTHER; note = 2'-O-methylcytidine-3'-phosphate
  modified_base 17: mod_base = OTHER; note = 2'-fluoroadenosine-3'-phosphorothioate
  modified_base 18: mod_base = OTHER; note = 2'-O-methyladenosine-3'-phosphorothioate
  modified_base 19: mod_base = OTHER; note 2'-fluorouridine-3'-phosphate-N,N'-((5S)-6-((6-hydroxy-5-(l ambda-3-methyl)hexyl)amino)-6-oxohexane-1,5-diyl)ditetradec anamide
catgaagatcatgaacaat

SEQ ID NO: 1290 - RNA, 21 nt, synthetic construct
  source 1..21: mol_type = other RNA
  modified_base 1: mod_base = OTHER; note 5'-(E)-vinylphosphonate-2'-O-methyladenosine-3'-phosphoroth ioate
  modified_base 2: mod_base = OTHER; note = 2'-fluorouridine-3'-phosphorothioate
  modified_base 3: mod_base = OTHER; note = 2'-O-methyluridine-3'-phosphate
  modified_base 4: mod_base = OTHER; note = 2'-fluoroguanosine-3'-phosphate
  modified_base 5: mod_base = OTHER; note = 2'-O-methyluridine-3'-phosphate
  modified_base 6: mod_base = OTHER; note = 2'-fluorouridine-3'-phosphate
  modified_base 7: mod_base = OTHER; note = 2'-O-methylcytidine-3'-phosphate
  modified_base 8: mod_base = OTHER; note = 2'-fluoroadenosine-3'-phosphate
  modified_base 9: mod_base = OTHER; note = 2'-O-methyluridine-3'-phosphate
  modified_base 10: mod_base = OTHER; note = 2'-fluoroguanosine-3'-phosphate
  modified_base 11: mod_base = OTHER; note = 2'-O-methyladenosine-3'-phosphate
  modified_base 12: mod_base = OTHER; note = 2'-fluorouridine-3'-phosphate
  modified_base 13: mod_base = OTHER; note = 2'-O-methylcytidine-3'-phosphate
  modified_base 14: mod_base = OTHER; note = 2'-fluorouridine-3'-phosphate
  modified_base 15: mod_base = OTHER; note = 2'-O-methyluridine-3'-phosphate
  modified_base 16: mod_base = OTHER; note = 2'-fluorocytidine-3'-phosphate
  modified_base 17: mod_base = OTHER; note = 2'-O-methyladenosine-3'-phosphate
  modified_base 18: mod_base = OTHER; note = 2'-fluorouridine-3'-phosphate
  modified_base 19: mod_base = OTHER; note = 2'-O-methylguanosine-3'-phosphorothioate
  modified_base 20: mod_base = OTHER; note = 2'-O-methylguanosine-3'-phosphorothioate
  modified_base 21: mod_base = OTHER; note = 2'-O-methylcytidine
attgttcatgatcttcatggc

SEQ ID NO: 1291 - RNA, 19 nt, synthetic construct
  source 1..19: mol_type = other RNA
  modified_base 1: mod_base = OTHER; note = 2'-fluorouridine-3'-phosphorothioate
  modified_base 2: mod_base = OTHER; note = 2'-O-methyluridine-3'-phosphorothioate
  modified_base 3: mod_base = OTHER; note = 2'-fluorocytidine-3'-phosphate
  modified_base 4: mod_base = OTHER; note = 2'-O-methylguanosine-3'-phosphate
  modified_base 5: mod_base = OTHER; note = 2'-fluorocytidine-3'-phosphate
  modified_base 6: mod_base = OTHER; note = 2'-O-methylcytidine-3'-phosphate
  modified_base 7: mod_base = OTHER; note = 2'-fluorouridine-3'-phosphate
  modified_base 8: mod_base = OTHER; note = 2'-O-methyladenosine-3'-phosphate
  modified_base 9: mod_base = OTHER; note = 2'-fluorouridine-3'-phosphate
  modified_base 10: mod_base = OTHER; note = 2'-O-methylguanosine-3'-phosphate
  modified_base 11: mod_base = OTHER; note = 2'-fluoroadenosine-3'-phosphate
  modified_base 12: mod_base = OTHER; note = 2'-O-methyladenosine-3'-phosphate
  modified_base 13: mod_base = OTHER; note = 2'-fluoroadenosine-3'-phosphate
  modified_base 14: mod_base = OTHER; note = 2'-O-methyluridine-3'-phosphate
  modified_base 15: mod_base = OTHER; note = 2'-fluoroguanosine-3'-phosphate
  modified_base 16: mod_base = OTHER; note = 2'-O-methyluridine-3'-phosphate
  modified_base 17: mod_base = OTHER; note = 2'-fluorouridine-3'-phosphorothioate
  modified_base 18: mod_base = OTHER; note = 2'-O-methylcytidine-3'-phosphorothioate
  modified_base 19: mod_base = OTHER; note 2'-fluorouridine-3'-phosphate-N,N'-((5S)-6-((6-hydroxy-5-(l ambda-3-methyl)hexyl)amino)-6-oxohexane-1,5-diyl)ditetradec anamide
ttcgcctatgaaatgttct

SEQ ID NO: 1292 - RNA, 21 nt, synthetic construct
  source 1..21: mol_type = other RNA
  modified_base 1: mod_base = OTHER; note 5'-(E)-vinylphosphonate-2'-O-methyladenosine-3'-phosphoroth ioate
  modified_base 2: mod_base = OTHER; note = 2'-fluoroguanosine-3'-phosphorothioate
  modified_base 3: mod_base = OTHER; note = 2'-O-methyladenosine-3'-phosphate
  modified_base 4: mod_base = OTHER; note = 2'-fluoroadenosine-3'-phosphate
  modified_base 5: mod_base = OTHER; note = 2'-O-methylcytidine-3'-phosphate
  modified_base 6: mod_base = OTHER; note = 2'-fluoroadenosine-3'-phosphate
  modified_base 7: mod_base = OTHER; note = 2'-O-methyluridine-3'-phosphate
  modified_base 8: mod_base = OTHER; note = 2'-fluorouridine-3'-phosphate
  modified_base 9: mod_base = OTHER; note = 2'-O-methyluridine-3'-phosphate
  modified_base 10: mod_base = OTHER; note = 2'-fluorocytidine-3'-phosphate
  modified_base 11: mod_base = OTHER; note = 2'-O-methyladenosine-3'-phosphate
  modified_base 12: mod_base = OTHER; note = 2'-fluorouridine-3'-phosphate
  modified_base 13: mod_base = OTHER; note = 2'-O-methyladenosine-3'-phosphate
  modified_base 14: mod_base = OTHER; note = 2'-fluoroguanosine-3'-phosphate
  modified_base 15: mod_base = OTHER; note = 2'-O-methylguanosine-3'-phosphate
  modified_base 16: mod_base = OTHER; note = 2'-fluorocytidine-3'-phosphate
  modified_base 17: mod_base = OTHER; note = 2'-O-methylguanosine-3'-phosphate
  modified_base 18: mod_base = OTHER; note = 2'-fluoroadenosine-3'-phosphate
  modified_base 19: mod_base = OTHER; note = 2'-O-methyladenosine-3'-phosphorothioate
  modified_base 20: mod_base = OTHER; note = 2'-O-methyluridine-3'-phosphorothioate
  modified_base 21: mod_base = OTHER; note = 2'-O-methyladenosine
agaacatttcataggcgaata

SEQ ID NO: 1293 - RNA, 19 nt, synthetic construct
  source 1..19: mol_type = other RNA
  modified_base 1: mod_base = OTHER; note = 2'-fluorouridine-3'-phosphorothioate
  modified_base 2: mod_base = OTHER; note = 2'-O-methylcytidine-3'-phosphorothioate
  modified_base 3: mod_base = OTHER; note = 2'-fluoroguanosine-3'-phosphate
  modified_base 4: mod_base = OTHER; note = 2'-O-methylcytidine-3'-phosphate
  modified_base 5: mod_base = OTHER; note = 2'-fluorocytidine-3'-phosphate
  modified_base 6: mod_base = OTHER; note = 2'-O-methyluridine-3'-phosphate
  modified_base 7: mod_base = OTHER; note = 2'-fluoroadenosine-3'-phosphate
  modified_base 8: mod_base = OTHER; note = 2'-O-methyluridine-3'-phosphate
  modified_base 9: mod_base = OTHER; note = 2'-fluoroguanosine-3'-phosphate
  modified_base 10: mod_base = OTHER; note = 2'-O-methyladenosine-3'-phosphate
  modified_base 11: mod_base = OTHER; note = 2'-fluoroadenosine-3'-phosphate
  modified_base 12: mod_base = OTHER; note = 2'-O-methyladenosine-3'-phosphate
  modified_base 13: mod_base = OTHER; note = 2'-fluorouridine-3'-phosphate
  modified_base 14: mod_base = OTHER; note = 2'-O-methylguanosine-3'-phosphate
  modified_base 15: mod_base = OTHER; note = 2'-fluorouridine-3'-phosphate
  modified_base 16: mod_base = OTHER; note = 2'-O-methyluridine-3'-phosphate
  modified_base 17: mod_base = OTHER; note = 2'-fluorocytidine-3'-phosphorothioate
  modified_base 18: mod_base = OTHER; note = 2'-O-methyluridine-3'-phosphorothioate
  modified_base 19: mod_base = OTHER; note 2'-fluoroadenosine-3'-phosphate-N,N'-((5S)-6-((6-hydroxy-5- (lambda-3-methyl)hexyl)amino)-6-oxohexane-1,5-diyl)ditetrad ecanamide
tcgcctatgaaatgttcta

SEQ ID NO: 1294 - RNA, 21 nt, synthetic construct
  source 1..21: mol_type = other RNA
  modified_base 1: mod_base = OTHER; note 5'-(E)-vinylphosphonate-2'-O-methyluridine-3'-phosphorothio ate
  modified_base 2: mod_base = OTHER; note = 2'-fluoroadenosine-3'-phosphorothioate
  modified_base 3: mod_base = OTHER; note = 2'-O-methylguanosine-3'-phosphate
  modified_base 4: mod_base = OTHER; note = 2'-fluoroadenosine-3'-phosphate
  modified_base 5: mod_base = OTHER; note = 2'-O-methyladenosine-3'-phosphate
  modified_base 6: mod_base = OTHER; note = 2'-fluorocytidine-3'-phosphate
  modified_base 7: mod_base = OTHER; note = 2'-O-methyladenosine-3'-phosphate
  modified_base 8: mod_base = OTHER; note = 2'-fluorouridine-3'-phosphate
  modified_base 9: mod_base = OTHER; note = 2'-O-methyluridine-3'-phosphate
  modified_base 10: mod_base = OTHER; note = 2'-fluorouridine-3'-phosphate
  modified_base 11: mod_base = OTHER; note = 2'-O-methylcytidine-3'-phosphate
  modified_base 12: mod_base = OTHER; note = 2'-fluoroadenosine-3'-phosphate
  modified_base 13: mod_base = OTHER; note = 2'-O-methyluridine-3'-phosphate
  modified_base 14: mod_base = OTHER; note = 2'-fluoroadenosine-3'-phosphate
  modified_base 15: mod_base = OTHER; note = 2'-O-methylguanosine-3'-phosphate
  modified_base 16: mod_base = OTHER; note = 2'-fluoroguanosine-3'-phosphate
  modified_base 17: mod_base = OTHER; note = 2'-O-methylcytidine-3'-phosphate
  modified_base 18: mod_base = OTHER; note = 2'-fluoroguanosine-3'-phosphate
  modified_base 19: mod_base = OTHER; note = 2'-O-methyladenosine-3'-phosphorothioate
  modified_base 20: mod_base = OTHER; note = 2'-O-methyladenosine-3'-phosphorothioate
  modified_base 21: mod_base = OTHER; note = 2'-O-methyluridine
tagaacatttcataggcgaat

SEQ ID NO: 1295 - RNA, 19 nt, synthetic construct
  source 1..19: mol_type = other RNA
  modified_base 1: mod_base = OTHER; note = 2'-fluorocytidine-3'-phosphorothioate
  modified_base 2: mod_base = OTHER; note = 2'-O-methyladenosine-3'-phosphorothioate
  modified_base 3: mod_base = OTHER; note = 2'-fluoroadenosine-3'-phosphate
  modified_base 4: mod_base = OTHER; note = 2'-O-methylguanosine-3'-phosphate
  modified_base 5: mod_base = OTHER; note = 2'-fluoroguanosine-3'-phosphate
  modified_base 6: mod_base = OTHER; note = 2'-O-methyladenosine-3'-phosphate
  modified_base 7: mod_base = OTHER; note = 2'-fluoroguanosine-3'-phosphate
  modified_base 8: mod_base = OTHER; note = 2'-O-methylcytidine-3'-phosphate
  modified_base 9: mod_base = OTHER; note = 2'-fluoroadenosine-3'-phosphate
  modified_base 10: mod_base = OTHER; note = 2'-O-methylcytidine-3'-phosphate
  modified_base 11: mod_base = OTHER; note = 2'-fluorocytidine-3'-phosphate
  modified_base 12: mod_base = OTHER; note = 2'-O-methyluridine-3'-phosphate
  modified_base 13: mod_base = OTHER; note = 2'-fluorocytidine-3'-phosphate
  modified_base 14: mod_base = OTHER; note = 2'-O-methyluridine-3'-phosphate
  modified_base 15: mod_base = OTHER; note = 2'-fluorocytidine-3'-phosphate
  modified_base 16: mod_base = OTHER; note = 2'-O-methyluridine-3'-phosphate
  modified_base 17: mod_base = OTHER; note = 2'-fluorocytidine-3'-phosphorothioate
  modified_base 18: mod_base = OTHER; note = 2'-O-methyluridine-3'-phosphorothioate
  modified_base 19: mod_base = OTHER; note 2'-fluorouridine-3'-phosphate-N,N'-((5S)-6-((6-hydroxy-5-(l ambda-3-methyl)hexyl)amino)-6-oxohexane-1,5-diyl)ditetradec anamide
caaggagcacctctctctt

SEQ ID NO: 1296 - RNA, 21 nt, synthetic construct
  source 1..21: mol_type = other RNA
  modified_base 1: mod_base = OTHER; note 5'-(E)-vinylphosphonate-2'-O-methyladenosine-3'-phosphoroth ioate
  modified_base 2: mod_base = OTHER; note = 2'-fluoroadenosine-3'-phosphorothioate
  modified_base 3: mod_base = OTHER; note = 2'-O-methylguanosine-3'-phosphate
  modified_base 4: mod_base = OTHER; note = 2'-fluoroadenosine-3'-phosphate
  modified_base 5: mod_base = OTHER; note = 2'-O-methylguanosine-3'-phosphate
  modified_base 6: mod_base = OTHER; note = 2'-fluoroadenosine-3'-phosphate
  modified_base 7: mod_base = OTHER; note = 2'-O-methylguanosine-3'-phosphate
  modified_base 8: mod_base = OTHER; note = 2'-fluoroadenosine-3'-phosphate
  modified_base 9: mod_base = OTHER; note = 2'-O-methylguanosine-3'-phosphate
  modified_base 10: mod_base = OTHER; note = 2'-fluoroguanosine-3'-phosphate
  modified_base 11: mod_base = OTHER; note = 2'-O-methyluridine-3'-phosphate
  modified_base 12: mod_base = OTHER; note = 2'-fluoroguanosine-3'-phosphate
  modified_base 13: mod_base = OTHER; note = 2'-O-methylcytidine-3'-phosphate
  modified_base 14: mod_base = OTHER; note = 2'-fluorouridine-3'-phosphate
  modified_base 15: mod_base = OTHER; note = 2'-O-methylcytidine-3'-phosphate
  modified_base 16: mod_base = OTHER; note = 2'-fluorocytidine-3'-phosphate
  modified_base 17: mod_base = OTHER; note = 2'-O-methyluridine-3'-phosphate
  modified_base 18: mod_base = OTHER; note = 2'-fluorouridine-3'-phosphate
  modified_base 19: mod_base = OTHER; note = 2'-O-methylguanosine-3'-phosphorothioate
  modified_base 20: mod_base = OTHER; note = 2'-O-methyluridine-3'-phosphorothioate
  modified_base 21: mod_base = OTHER; note = 2'-O-methyladenosine
aagagagaggtgctccttgta

SEQ ID NO: 1297 - RNA, 19 nt, synthetic construct
  source 1..19: mol_type = other RNA
  modified_base 1: mod_base = OTHER; note = 2'-fluorocytidine-3'-phosphorothioate
  modified_base 2: mod_base = OTHER; note = 2'-O-methyluridine-3'-phosphorothioate
  modified_base 3: mod_base = OTHER; note = 2'-fluorouridine-3'-phosphate
  modified_base 4: mod_base = OTHER; note = 2'-O-methylcytidine-3'-phosphate
  modified_base 5: mod_base = OTHER; note = 2'-fluorouridine-3'-phosphate
  modified_base 6: mod_base = OTHER; note = 2'-O-methyluridine-3'-phosphate
  modified_base 7: mod_base = OTHER; note = 2'-fluorocytidine-3'-phosphate
  modified_base 8: mod_base = OTHER; note = 2'-O-methyluridine-3'-phosphate
  modified_base 9: mod_base = OTHER; note = 2'-fluorouridine-3'-phosphate
  modified_base 10: mod_base = OTHER; note = 2'-O-methyluridine-3'-phosphate
  modified_base 11: mod_base = OTHER; note = 2'-fluoroguanosine-3'-phosphate
  modified_base 12: mod_base = OTHER; note = 2'-O-methylguanosine-3'-phosphate
  modified_base 13: mod_base = OTHER; note = 2'-fluorocytidine-3'-phosphate
  modified_base 14: mod_base = OTHER; note = 2'-O-methylcytidine-3'-phosphate
  modified_base 15: mod_base = OTHER; note = 2'-fluorouridine-3'-phosphate
  modified_base 16: mod_base = OTHER; note = 2'-O-methylcytidine-3'-phosphate
  modified_base 17: mod_base = OTHER; note = 2'-fluoroguanosine-3'-phosphorothioate
  modified_base 18: mod_base = OTHER; note = 2'-O-methyladenosine-3'-phosphorothioate
  modified_base 19: mod_base = OTHER; note 2'-fluorouridine-3'-phosphate-N,N'-((5S)-6-((6-hydroxy-5-(l ambda-3-methyl)hexyl)amino)-6-oxohexane-1,5-diyl)ditetradec anamide
cttcttctttggcctcgat

SEQ ID NO: 1298 - RNA, 21 nt, synthetic construct
  source 1..21: mol_type = other RNA
  modified_base 1: mod_base = OTHER; note 5'-(E)-vinylphosphonate-2'-O-methyladenosine-3'-phosphoroth ioate
  modified_base 2: mod_base = OTHER; note = 2'-fluorouridine-3'-phosphorothioate
  modified_base 3: mod_base = OTHER; note = 2'-O-methylcytidine-3'-phosphate
  modified_base 4: mod_base = OTHER; note = 2'-fluoroguanosine-3'-phosphate
  modified_base 5: mod_base = OTHER; note = 2'-O-methyladenosine-3'-phosphate
  modified_base 6: mod_base = OTHER; note = 2'-fluoroguanosine-3'-phosphate
  modified_base 7: mod_base = OTHER; note = 2'-O-methylguanosine-3'-phosphate
  modified_base 8: mod_base = OTHER; note = 2'-fluorocytidine-3'-phosphate
  modified_base 9: mod_base = OTHER; note = 2'-O-methylcytidine-3'-phosphate
  modified_base 10: mod_base = OTHER; note = 2'-fluoroadenosine-3'-phosphate
  modified_base 11: mod_base = OTHER; note = 2'-O-methyladenosine-3'-phosphate
  modified_base 12: mod_base = OTHER; note = 2'-fluoroadenosine-3'-phosphate
  modified_base 13: mod_base = OTHER; note = 2'-O-methylguanosine-3'-phosphate
  modified_base 14: mod_base = OTHER; note = 2'-fluoroadenosine-3'-phosphate
  modified_base 15: mod_base = OTHER; note = 2'-O-methyladenosine-3'-phosphate
  modified_base 16: mod_base = OTHER; note = 2'-fluoroguanosine-3'-phosphate
  modified_base 17: mod_base = OTHER; note = 2'-O-methyladenosine-3'-phosphate
  modified_base 18: mod_base = OTHER; note = 2'-fluoroadenosine-3'-phosphate
  modified_base 19: mod_base = OTHER; note = 2'-O-methylguanosine-3'-phosphorothioate
  modified_base 20: mod_base = OTHER; note = 2'-O-methylguanosine-3'-phosphorothioate
  modified_base 21: mod_base = OTHER; note = 2'-O-methylguanosine
atcgaggccaaagaagaaggg

SEQ ID NO: 1299 - RNA, 19 nt, synthetic construct
  source 1..19: mol_type = other RNA
  modified_base 1: mod_base = OTHER; note = 2'-fluoroadenosine-3'-phosphorothioate
  modified_base 2: mod_base = OTHER; note = 2'-O-methyladenosine-3'-phosphorothioate
  modified_base 3: mod_base = OTHER; note = 2'-fluorocytidine-3'-phosphate
  modified_base 4: mod_base = OTHER; note = 2'-O-methylcytidine-3'-phosphate
  modified_base 5: mod_base = OTHER; note = 2'-fluorocytidine-3'-phosphate
  modified_base 6: mod_base = OTHER; note = 2'-O-methyluridine-3'-phosphate
  modified_base 7: mod_base = OTHER; note = 2'-fluoroadenosine-3'-phosphate
  modified_base 8: mod_base = OTHER; note = 2'-O-methylguanosine-3'-phosphate
  modified_base 9: mod_base = OTHER; note = 2'-fluoroadenosine-3'-phosphate
  modified_base 10: mod_base = OTHER; note = 2'-O-methyladenosine-3'-phosphate
  modified_base 11: mod_base = OTHER; note = 2'-fluorocytidine-3'-phosphate
  modified_base 12: mod_base = OTHER; note = 2'-O-methyluridine-3'-phosphate
  modified_base 13: mod_base = OTHER; note = 2'-fluoroguanosine-3'-phosphate
  modified_base 14: mod_base = OTHER; note = 2'-O-methyluridine-3'-phosphate
  modified_base 15: mod_base = OTHER; note = 2'-fluorocytidine-3'-phosphate
  modified_base 16: mod_base = OTHER; note = 2'-O-methyluridine-3'-phosphate
  modified_base 17: mod_base = OTHER; note = 2'-fluorouridine-3'-phosphorothioate
  modified_base 18: mod_base = OTHER; note = 2'-O-methylcytidine-3'-phosphorothioate
  modified_base 19: mod_base = OTHER; note 2'-fluorouridine-3'-phosphate-N,N'-((5S)-6-((6-hydroxy-5-(l ambda-3-methyl)hexyl)amino)-6-oxohexane-1,5-diyl)ditetradec anamide
aaccctagaactgtcttct

SEQ ID NO: 1300 - RNA, 21 nt, synthetic construct
  source 1..21: mol_type = other RNA
  modified_base 1: mod_base = OTHER; note 5'-(E)-vinylphosphonate-2'-O-methyladenosine-3'-phosphoroth ioate
  modified_base 2: mod_base = OTHER; note = 2'-fluoroguanosine-3'-phosphorothioate
  modified_base 3: mod_base = OTHER; note = 2'-O-methyladenosine-3'-phosphate
  modified_base 4: mod_base = OTHER; note = 2'-fluoroadenosine-3'-phosphate
  modified_base 5: mod_base = OTHER; note = 2'-O-methylguanosine-3'-phosphate
  modified_base 6: mod_base = OTHER; note = 2'-fluoroadenosine-3'-phosphate
  modified_base 7: mod_base = OTHER; note = 2'-O-methylcytidine-3'-phosphate
  modified_base 8: mod_base = OTHER; note = 2'-fluoroadenosine-3'-phosphate
  modified_base 9: mod_base = OTHER; note = 2'-O-methylguanosine-3'-phosphate
  modified_base 10: mod_base = OTHER; note = 2'-fluorouridine-3'-phosphate
  modified_base 11: mod_base = OTHER; note = 2'-O-methyluridine-3'-phosphate
  modified_base 12: mod_base = OTHER; note = 2'-fluorocytidine-3'-phosphate
  modified_base 13: mod_base = OTHER; note = 2'-O-methyluridine-3'-phosphate
  modified_base 14: mod_base = OTHER; note = 2'-fluoroadenosine-3'-phosphate
  modified_base 15: mod_base = OTHER; note = 2'-O-methylguanosine-3'-phosphate
  modified_base 16: mod_base = OTHER; note = 2'-fluoroguanosine-3'-phosphate
  modified_base 17: mod_base = OTHER; note = 2'-O-methylguanosine-3'-phosphate
  modified_base 18: mod_base = OTHER; note = 2'-fluorouridine-3'-phosphate
  modified_base 19: mod_base = OTHER; note = 2'-O-methyluridine-3'-phosphorothioate
  modified_base 20: mod_base = OTHER; note = 2'-O-methylcytidine-3'-phosphorothioate
  modified_base 21: mod_base = OTHER; note = 2'-O-methyladenosine
agaagacagttctagggttca

SEQ ID NO: 1301 - RNA, 19 nt, synthetic construct
  source 1..19: mol_type = other RNA
  modified_base 1: mod_base = OTHER; note = 2'-fluorouridine-3'-phosphorothioate
  modified_base 2: mod_base = OTHER; note = 2'-O-methyluridine-3'-phosphorothioate
  modified_base 3: mod_base = OTHER; note = 2'-fluoroadenosine-3'-phosphate
  modified_base 4: mod_base = OTHER; note = 2'-O-methylcytidine-3'-phosphate
  modified_base 5: mod_base = OTHER; note = 2'-fluorouridine-3'-phosphate
  modified_base 6: mod_base = OTHER; note = 2'-O-methylcytidine-3'-phosphate
  modified_base 7: mod_base = OTHER; note = 2'-fluoroguanosine-3'-phosphate
  modified_base 8: mod_base = OTHER; note = 2'-O-methylguanosine-3'-phosphate
  modified_base 9: mod_base = OTHER; note = 2'-fluoroguanosine-3'-phosphate
  modified_base 10: mod_base = OTHER; note = 2'-O-methyladenosine-3'-phosphate
  modified_base 11: mod_base = OTHER; note = 2'-fluoroadenosine-3'-phosphate
  modified_base 12: mod_base = OTHER; note = 2'-O-methyladenosine-3'-phosphate
  modified_base 13: mod_base = OTHER; note = 2'-fluorouridine-3'-phosphate
  modified_base 14: mod_base = OTHER; note = 2'-O-methyluridine-3'-phosphate
  modified_base 15: mod_base = OTHER; note = 2'-fluorouridine-3'-phosphate
  modified_base 16: mod_base = OTHER; note = 2'-O-methylguanosine-3'-phosphate
  modified_base 17: mod_base = OTHER; note = 2'-fluorocytidine-3'-phosphorothioate
  modified_base 18: mod_base = OTHER; note = 2'-O-methyluridine-3'-phosphorothioate
  modified_base 19: mod_base = OTHER; note 2'-fluorouridine-3'-phosphate-N,N'-((5S)-6-((6-hydroxy-5-(l ambda-3-methyl)hexyl)amino)-6-oxohexane-1,5-diyl)ditetradec anamide
ttactcgggaaatttgctt

SEQ ID NO: 1302 - RNA, 21 nt, synthetic construct
  source 1..21: mol_type = other RNA
  modified_base 1: mod_base = OTHER; note 5'-(E)-vinylphosphonate-2'-O-methyladenosine-3'-phosphoroth ioate
  modified_base 2: mod_base = OTHER; note = 2'-fluoroadenosine-3'-phosphorothioate
  modified_base 3: mod_base = OTHER; note = 2'-O-methylguanosine-3'-phosphate
  modified_base 4: mod_base = OTHER; note = 2'-fluorocytidine-3'-phosphate
  modified_base 5: mod_base = OTHER; note = 2'-O-methyladenosine-3'-phosphate
  modified_base 6: mod_base = OTHER; note = 2'-fluoroadenosine-3'-phosphate
  modified_base 7: mod_base = OTHER; note = 2'-O-methyladenosine-3'-phosphate
  modified_base 8: mod_base = OTHER; note = 2'-fluorouridine-3'-phosphate
  modified_base 9: mod_base = OTHER; note = 2'-O-methyluridine-3'-phosphate
  modified_base 10: mod_base = OTHER; note = 2'-fluorouridine-3'-phosphate
  modified_base 11: mod_base = OTHER; note = 2'-O-methylcytidine-3'-phosphate
  modified_base 12: mod_base = OTHER; note = 2'-fluorocytidine-3'-phosphate
  modified_base 13: mod_base = OTHER; note = 2'-O-methylcytidine-3'-phosphate
  modified_base 14: mod_base = OTHER; note = 2'-fluoroguanosine-3'-phosphate
  modified_base 15: mod_base = OTHER; note = 2'-O-methyladenosine-3'-phosphate
  modified_base 16: mod_base = OTHER; note = 2'-fluoroguanosine-3'-phosphate
  modified_base 17: mod_base = OTHER; note = 2'-O-methyluridine-3'-phosphate
  modified_base 18: mod_base = OTHER; note = 2'-fluoroadenosine-3'-phosphate
  modified_base 19: mod_base = OTHER; note = 2'-O-methyladenosine-3'-phosphorothioate
  modified_base 20: mod_base = OTHER; note = 2'-O-methylguanosine-3'-phosphorothioate
  modified_base 21: mod_base = OTHER; note = 2'-O-methylcytidine
aagcaaatttcccgagtaagc

SEQ ID NO: 1303 - RNA, 19 nt, synthetic construct
  source 1..19: mol_type = other RNA
  modified_base 1: mod_base = OTHER; note = 2'-fluorouridine-3'-phosphorothioate
  modified_base 2: mod_base = OTHER; note = 2'-O-methylcytidine-3'-phosphorothioate
  modified_base 3: mod_base = OTHER; note = 2'-fluoroguanosine-3'-phosphate
  modified_base 4: mod_base = OTHER; note = 2'-O-methylguanosine-3'-phosphate
  modified_base 5: mod_base = OTHER; note = 2'-fluoroguanosine-3'-phosphate
  modified_base 6: mod_base = OTHER; note = 2'-O-methyladenosine-3'-phosphate
  modified_base 7: mod_base = OTHER; note = 2'-fluoroadenosine-3'-phosphate
  modified_base 8: mod_base = OTHER; note = 2'-O-methyladenosine-3'-phosphate
  modified_base 9: mod_base = OTHER; note = 2'-fluorouridine-3'-phosphate
  modified_base 10: mod_base = OTHER; note = 2'-O-methyluridine-3'-phosphate
  modified_base 11: mod_base = OTHER; note = 2'-fluorouridine-3'-phosphate
  modified_base 12: mod_base = OTHER; note = 2'-O-methylguanosine-3'-phosphate
  modified_base 13: mod_base = OTHER; note = 2'-fluorocytidine-3'-phosphate
  modified_base 14: mod_base = OTHER; note = 2'-O-methyluridine-3'-phosphate
  modified_base 15: mod_base = OTHER; note = 2'-fluorouridine-3'-phosphate
  modified_base 16: mod_base = OTHER; note = 2'-O-methyluridine-3'-phosphate
  modified_base 17: mod_base = OTHER; note = 2'-fluorouridine-3'-phosphorothioate
  modified_base 18: mod_base = OTHER; note = 2'-O-methylguanosine-3'-phosphorothioate
  modified_base 19: mod_base = OTHER; note 2'-fluorouridine-3'-phosphate-N,N'-((5S)-6-((6-hydroxy-5-(l ambda-3-methyl)hexyl)amino)-6-oxohexane-1,5-diyl)ditetradec anamide
tcgggaaatttgcttttgt

SEQ ID NO: 1304 - RNA, 21 nt, synthetic construct
  source 1..21: mol_type = other RNA
  modified_base 1: mod_base = OTHER; note 5'-(E)-vinylphosphonate-2'-O-methyluridine-3'-phosphorothio ate
  modified_base 2: mod_base = OTHER; note = 2'-fluorocytidine-3'-phosphorothioate
  modified_base 3: mod_base = OTHER; note = 2'-O-methyladenosine-3'-phosphate
  modified_base 4: mod_base = OTHER; note = 2'-fluoroadenosine-3'-phosphate
  modified_base 5: mod_base = OTHER; note = 2'-O-methyladenosine-3'-phosphate
  modified_base 6: mod_base = OTHER; note = 2'-fluoroadenosine-3'-phosphate
  modified_base 7: mod_base = OTHER; note = 2'-O-methylguanosine-3'-phosphate
  modified_base 8: mod_base = OTHER; note = 2'-fluorocytidine-3'-phosphate
  modified_base 9: mod_base = OTHER; note = 2'-O-methyladenosine-3'-phosphate
  modified_base 10: mod_base = OTHER; note = 2'-fluoroadenosine-3'-phosphate
  modified_base 11: mod_base = OTHER; note = 2'-O-methyladenosine-3'-phosphate
  modified_base 12: mod_base = OTHER; note = 2'-fluorouridine-3'-phosphate
  modified_base 13: mod_base = OTHER; note = 2'-O-methyluridine-3'-phosphate
  modified_base 14: mod_base = OTHER; note = 2'-fluorouridine-3'-phosphate
  modified_base 15: mod_base = OTHER; note = 2'-O-methylcytidine-3'-phosphate
  modified_base 16: mod_base = OTHER; note = 2'-fluorocytidine-3'-phosphate
  modified_base 17: mod_base = OTHER; note = 2'-O-methylcytidine-3'-phosphate
  modified_base 18: mod_base = OTHER; note = 2'-fluoroguanosine-3'-phosphate
  modified_base 19: mod_base = OTHER; note = 2'-O-methyladenosine-3'-phosphorothioate
  modified_base 20: mod_base = OTHER; note = 2'-O-methylguanosine-3'-phosphorothioate
  modified_base 21: mod_base = OTHER; note = 2'-O-methyluridine
tcaaaagcaaatttcccgagt

SEQ ID NO: 1305 - RNA, 19 nt, synthetic construct
  source 1..19: mol_type = other RNA
  modified_base 1: mod_base = OTHER; note = 2'-fluoroguanosine-3'-phosphorothioate
  modified_base 2: mod_base = OTHER; note = 2'-O-methyladenosine-3'-phosphorothioate
  modified_base 3: mod_base = OTHER; note = 2'-fluoroadenosine-3'-phosphate
  modified_base 4: mod_base = OTHER; note = 2'-O-methyladenosine-3'-phosphate
  modified_base 5: mod_base = OTHER; note = 2'-fluorouridine-3'-phosphate
  modified_base 6: mod_base = OTHER; note = 2'-O-methyluridine-3'-phosphate
  modified_base 7: mod_base = OTHER; note = 2'-fluorouridine-3'-phosphate
  modified_base 8: mod_base = OTHER; note = 2'-O-methylguanosine-3'-phosphate
  modified_base 9: mod_base = OTHER; note = 2'-fluorocytidine-3'-phosphate
  modified_base 10: mod_base = OTHER; note = 2'-O-methyluridine-3'-phosphate
  modified_base 11: mod_base = OTHER; note = 2'-fluorouridine-3'-phosphate
  modified_base 12: mod_base = OTHER; note = 2'-O-methyluridine-3'-phosphate
  modified_base 13: mod_base = OTHER; note = 2'-fluorouridine-3'-phosphate
  modified_base 14: mod_base = OTHER; note = 2'-O-methylguanosine-3'-phosphate
  modified_base 15: mod_base = OTHER; note = 2'-fluorocytidine-3'-phosphate
  modified_base 16: mod_base = OTHER; note = 2'-O-methylcytidine-3'-phosphate
  modified_base 17: mod_base = OTHER; note = 2'-fluoroadenosine-3'-phosphorothioate
  modified_base 18: mod_base = OTHER; note = 2'-O-methyladenosine-3'-phosphorothioate
  modified_base 19: mod_base = OTHER; note 2'-fluoroadenosine-3'-phosphate-N,N'-((5S)-6-((6-hydroxy-5- (lambda-3-methyl)hexyl)amino)-6-oxohexane-1,5-diyl)ditetrad ecanamide
gaaatttgcttttgccaaa

SEQ ID NO: 1306 - RNA, 21 nt, synthetic construct
  source 1..21: mol_type = other RNA
  modified_base 1: mod_base = OTHER; note 5'-(E)-vinylphosphonate-2'-O-methyluridine-3'-phosphorothio ate
  modified_base 2: mod_base = OTHER; note = 2'-fluorouridine-3'-phosphorothioate
  modified_base 3: mod_base = OTHER; note = 2'-O-methyluridine-3'-phosphate
  modified_base 4: mod_base = OTHER; note = 2'-fluoroguanosine-3'-phosphate
  modified_base 5: mod_base = OTHER; note = 2'-O-methylguanosine-3'-phosphate
  modified_base 6: mod_base = OTHER; note = 2'-fluorocytidine-3'-phosphate
  modified_base 7: mod_base = OTHER; note = 2'-O-methyladenosine-3'-phosphate
  modified_base 8: mod_base = OTHER; note = 2'-fluoroadenosine-3'-phosphate
  modified_base 9: mod_base = OTHER; note = 2'-O-methyladenosine-3'-phosphate
  modified_base 10: mod_base = OTHER; note = 2'-fluoroadenosine-3'-phosphate
  modified_base 11: mod_base = OTHER; note = 2'-O-methylguanosine-3'-phosphate
  modified_base 12: mod_base = OTHER; note = 2'-fluorocytidine-3'-phosphate
  modified_base 13: mod_base = OTHER; note = 2'-O-methyladenosine-3'-phosphate
  modified_base 14: mod_base = OTHER; note = 2'-fluoroadenosine-3'-phosphate
  modified_base 15: mod_base = OTHER; note = 2'-O-methyladenosine-3'-phosphate
  modified_base 16: mod_base = OTHER; note = 2'-fluorouridine-3'-phosphate
  modified_base 17: mod_base = OTHER; note = 2'-O-methyluridine-3'-phosphate
  modified_base 18: mod_base = OTHER; note = 2'-fluorouridine-3'-phosphate
  modified_base 19: mod_base = OTHER; note = 2'-O-methylcytidine-3'-phosphorothioate
  modified_base 20: mod_base = OTHER; note = 2'-O-methylcytidine-3'-phosphorothioate
  modified_base 21: mod_base = OTHER; note = 2'-O-methylcytidine
tttggcaaaagcaaatttccc

SEQ ID NO: 1307 - RNA, 19 nt, synthetic construct
  source 1..19: mol_type = other RNA
  modified_base 1: mod_base = OTHER; note = 2'-fluorocytidine-3'-phosphorothioate
  modified_base 2: mod_base = OTHER; note = 2'-O-methyluridine-3'-phosphorothioate
  modified_base 3: mod_base = OTHER; note = 2'-fluorouridine-3'-phosphate
  modified_base 4: mod_base = OTHER; note = 2'-O-methylcytidine-3'-phosphate
  modified_base 5: mod_base = OTHER; note = 2'-fluoroguanosine-3'-phosphate
  modified_base 6: mod_base = OTHER; note = 2'-O-methylguanosine-3'-phosphate
  modified_base 7: mod_base = OTHER; note = 2'-fluorocytidine-3'-phosphate
  modified_base 8: mod_base = OTHER; note = 2'-O-methylguanosine-3'-phosphate
  modified_base 9: mod_base = OTHER; note = 2'-fluoroguanosine-3'-phosphate
  modified_base 10: mod_base = OTHER; note = 2'-O-methyluridine-3'-phosphate
  modified_base 11: mod_base = OTHER; note = 2'-fluorouridine-3'-phosphate
  modified_base 12: mod_base = OTHER; note = 2'-O-methyluridine-3'-phosphate
  modified_base 13: mod_base = OTHER; note = 2'-fluoroguanosine-3'-phosphate
  modified_base 14: mod_base = OTHER; note = 2'-O-methylguanosine-3'-phosphate
  modified_base 15: mod_base = OTHER; note = 2'-fluoroadenosine-3'-phosphate
  modified_base 16: mod_base = OTHER; note = 2'-O-methyluridine-3'-phosphate
  modified_base 17: mod_base = OTHER; note = 2'-fluoroadenosine-3'-phosphorothioate
  modified_base 18: mod_base = OTHER; note = 2'-O-methyluridine-3'-phosphorothioate
  modified_base 19: mod_base = OTHER; note 2'-fluorouridine-3'-phosphate-N,N'-((5S)-6-((6-hydroxy-5-(l ambda-3-methyl)hexyl)amino)-6-oxohexane-1,5-diyl)ditetradec anamide
cttcggcggtttggatatt

SEQ ID NO: 1308 - RNA, 21 nt, synthetic construct
  source 1..21: mol_type = other RNA
  modified_base 1: mod_base = OTHER; note 5'-(E)-vinylphosphonate-2'-O-methyladenosine-3'-phosphoroth ioate
  modified_base 2: mod_base = OTHER; note = 2'-fluoroadenosine-3'-phosphorothioate
  modified_base 3: mod_base = OTHER; note = 2'-O-methyluridine-3'-phosphate
  modified_base 4: mod_base = OTHER; note = 2'-fluoroadenosine-3'-phosphate
  modified_base 5: mod_base = OTHER; note = 2'-O-methyluridine-3'-phosphate
  modified_base 6: mod_base = OTHER; note = 2'-fluorocytidine-3'-phosphate
  modified_base 7: mod_base = OTHER; note = 2'-O-methylcytidine-3'-phosphate
  modified_base 8: mod_base = OTHER; note = 2'-fluoroadenosine-3'-phosphate
  modified_base 9: mod_base = OTHER; note = 2'-O-methyladenosine-3'-phosphate
  modified_base 10: mod_base = OTHER; note = 2'-fluoroadenosine-3'-phosphate
  modified_base 11: mod_base = OTHER; note = 2'-O-methylcytidine-3'-phosphate
  modified_base 12: mod_base = OTHER; note = 2'-fluorocytidine-3'-phosphate
  modified_base 13: mod_base = OTHER; note = 2'-O-methylguanosine-3'-phosphate
  modified_base 14: mod_base = OTHER; note = 2'-fluorocytidine-3'-phosphate
  modified_base 15: mod_base = OTHER; note = 2'-O-methylcytidine-3'-phosphate
  modified_base 16: mod_base = OTHER; note = 2'-fluoroguanosine-3'-phosphate
  modified_base 17: mod_base = OTHER; note = 2'-O-methyladenosine-3'-phosphate
  modified_base 18: mod_base = OTHER; note = 2'-fluoroadenosine-3'-phosphate
  modified_base 19: mod_base = OTHER; note = 2'-O-methylguanosine-3'-phosphorothioate
  modified_base 20: mod_base = OTHER; note = 2'-O-methylcytidine-3'-phosphorothioate
  modified_base 21: mod_base = OTHER; note = 2'-O-methylguanosine
aatatccaaaccgccgaagcg

SEQ ID NO: 1309 - RNA, 19 nt, synthetic construct
  source 1..19: mol_type = other RNA
  modified_base 1: mod_base = OTHER; note = 2'-fluorouridine-3'-phosphorothioate
  modified_base 2: mod_base = OTHER; note = 2'-O-methylcytidine-3'-phosphorothioate
  modified_base 3: mod_base = OTHER; note = 2'-fluoroguanosine-3'-phosphate
  modified_base 4: mod_base = OTHER; note = 2'-O-methylguanosine-3'-phosphate
  modified_base 5: mod_base = OTHER; note = 2'-fluorocytidine-3'-phosphate
  modified_base 6: mod_base = OTHER; note = 2'-O-methylguanosine-3'-phosphate
  modified_base 7: mod_base = OTHER; note = 2'-fluoroguanosine-3'-phosphate
  modified_base 8: mod_base = OTHER; note = 2'-O-methyluridine-3'-phosphate
  modified_base 9: mod_base = OTHER; note = 2'-fluorouridine-3'-phosphate
  modified_base 10: mod_base = OTHER; note = 2'-O-methyluridine-3'-phosphate
  modified_base 11: mod_base = OTHER; note = 2'-fluoroguanosine-3'-phosphate
  modified_base 12: mod_base = OTHER; note = 2'-O-methylguanosine-3'-phosphate
  modified_base 13: mod_base = OTHER; note = 2'-fluoroadenosine-3'-phosphate
  modified_base 14: mod_base = OTHER; note = 2'-O-methyluridine-3'-phosphate
  modified_base 15: mod_base = OTHER; note = 2'-fluoroadenosine-3'-phosphate
  modified_base 16: mod_base = OTHER; note = 2'-O-methyluridine-3'-phosphate
  modified_base 17: mod_base = OTHER; note = 2'-fluorouridine-3'-phosphorothioate
  modified_base 18: mod_base = OTHER; note = 2'-O-methyluridine-3'-phosphorothioate
  modified_base 19: mod_base = OTHER; note 2'-fluoroadenosine-3'-phosphate-N,N'-((5S)-6-((6-hydroxy-5- (lambda-3-methyl)hexyl)amino)-6-oxohexane-1,5-diyl)ditetrad ecanamide
tcggcggtttggatattta

SEQ ID NO: 1310 - RNA, 21 nt, synthetic construct
  source 1..21: mol_type = other RNA
  modified_base 1: mod_base = OTHER; note 5'-(E)-vinylphosphonate-2'-O-methyluridine-3'-phosphorothio ate
  modified_base 2: mod_base = OTHER; note = 2'-fluoroadenosine-3'-phosphorothioate
  modified_base 3: mod_base = OTHER; note = 2'-O-methyladenosine-3'-phosphate
  modified_base 4: mod_base = OTHER; note = 2'-fluoroadenosine-3'-phosphate
  modified_base 5: mod_base = OTHER; note = 2'-O-methyluridine-3'-phosphate
  modified_base 6: mod_base = OTHER; note = 2'-fluoroadenosine-3'-phosphate
  modified_base 7: mod_base = OTHER; note = 2'-O-methyluridine-3'-phosphate
  modified_base 8: mod_base = OTHER; note = 2'-fluorocytidine-3'-phosphate
  modified_base 9: mod_base = OTHER; note = 2'-O-methylcytidine-3'-phosphate
  modified_base 10: mod_base = OTHER; note = 2'-fluoroadenosine-3'-phosphate
  modified_base 11: mod_base = OTHER; note = 2'-O-methyladenosine-3'-phosphate
  modified_base 12: mod_base = OTHER; note = 2'-fluoroadenosine-3'-phosphate
  modified_base 13: mod_base = OTHER; note = 2'-O-methylcytidine-3'-phosphate
  modified_base 14: mod_base = OTHER; note = 2'-fluorocytidine-3'-phosphate
  modified_base 15: mod_base = OTHER; note = 2'-O-methylguanosine-3'-phosphate
  modified_base 16: mod_base = OTHER; note = 2'-fluorocytidine-3'-phosphate
  modified_base 17: mod_base = OTHER; note = 2'-O-methylcytidine-3'-phosphate
  modified_base 18: mod_base = OTHER; note = 2'-fluoroguanosine-3'-phosphate
  modified_base 19: mod_base = OTHER; note = 2'-O-methyladenosine-3'-phosphorothioate
  modified_base 20: mod_base = OTHER; note = 2'-O-methyladenosine-3'-phosphorothioate
  modified_base 21: mod_base = OTHER; note = 2'-O-methylguanosine
taaatatccaaaccgccgaag

SEQ ID NO: 1311 - RNA, 19 nt, synthetic construct
  source 1..19: mol_type = other RNA
  modified_base 1: mod_base = OTHER; note = 2'-fluorocytidine-3'-phosphorothioate
  modified_base 2: mod_base = OTHER; note = 2'-O-methylguanosine-3'-phosphorothioate
  modified_base 3: mod_base = OTHER; note = 2'-fluoroguanosine-3'-phosphate
  modified_base 4: mod_base = OTHER; note = 2'-O-methyluridine-3'-phosphate
  modified_base 5: mod_base = OTHER; note = 2'-fluorouridine-3'-phosphate
  modified_base 6: mod_base = OTHER; note = 2'-O-methyluridine-3'-phosphate
  modified_base 7: mod_base = OTHER; note = 2'-fluoroguanosine-3'-phosphate
  modified_base 8: mod_base = OTHER; note = 2'-O-methylguanosine-3'-phosphate
  modified_base 9: mod_base = OTHER; note = 2'-fluoroadenosine-3'-phosphate
  modified_base 10: mod_base = OTHER; note = 2'-O-methyluridine-3'-phosphate
  modified_base 11: mod_base = OTHER; note = 2'-fluoroadenosine-3'-phosphate
  modified_base 12: mod_base = OTHER; note = 2'-O-methyluridine-3'-phosphate
  modified_base 13: mod_base = OTHER; note = 2'-fluorouridine-3'-phosphate
  modified_base 14: mod_base = OTHER; note = 2'-O-methyluridine-3'-phosphate
  modified_base 15: mod_base = OTHER; note = 2'-fluoroadenosine-3'-phosphate
  modified_base 16: mod_base = OTHER; note = 2'-O-methyluridine-3'-phosphate
  modified_base 17: mod_base = OTHER; note = 2'-fluorouridine-3'-phosphorothioate
  modified_base 18: mod_base = OTHER; note = 2'-O-methylguanosine-3'-phosphorothioate
  modified_base 19: mod_base = OTHER; note 2'-fluoroadenosine-3'-phosphate-N,N'-((5S)-6-((6-hydroxy-5- (lambda-3-methyl)hexyl)amino)-6-oxohexane-1,5-diyl)ditetrad ecanamide
cggtttggatatttattga

SEQ ID NO: 1312 - RNA, 21 nt, synthetic construct
  source 1..21: mol_type = other RNA
  modified_base 1: mod_base = OTHER; note 5'-(E)-vinylphosphonate-2'-O-methyluridine-3'-phosphorothio ate
  modified_base 2: mod_base = OTHER; note = 2'-fluorocytidine-3'-phosphorothioate
  modified_base 3: mod_base = OTHER; note = 2'-O-methyladenosine-3'-phosphate
  modified_base 4: mod_base = OTHER; note = 2'-fluoroadenosine-3'-phosphate
  modified_base 5: mod_base = OTHER; note = 2'-O-methyluridine-3'-phosphate
  modified_base 6: mod_base = OTHER; note = 2'-fluoroadenosine-3'-phosphate
  modified_base 7: mod_base = OTHER; note = 2'-O-methyladenosine-3'-phosphate
  modified_base 8: mod_base = OTHER; note = 2'-fluoroadenosine-3'-phosphate
  modified_base 9: mod_base = OTHER; note = 2'-O-methyluridine-3'-phosphate
  modified_base 10: mod_base = OTHER; note = 2'-fluoroadenosine-3'-phosphate
  modified_base 11: mod_base = OTHER; note = 2'-O-methyluridine-3'-phosphate
  modified_base 12: mod_base = OTHER; note = 2'-fluorocytidine-3'-phosphate
  modified_base 13: mod_base = OTHER; note = 2'-O-methylcytidine-3'-phosphate
  modified_base 14: mod_base = OTHER; note = 2'-fluoroadenosine-3'-phosphate
  modified_base 15: mod_base = OTHER; note = 2'-O-methyladenosine-3'-phosphate
  modified_base 16: mod_base = OTHER; note = 2'-fluoroadenosine-3'-phosphate
  modified_base 17: mod_base = OTHER; note = 2'-O-methylcytidine-3'-phosphate
  modified_base 18: mod_base = OTHER; note = 2'-fluorocytidine-3'-phosphate
  modified_base 19: mod_base = OTHER; note = 2'-O-methylguanosine-3'-phosphorothioate
  modified_base 20: mod_base = OTHER; note = 2'-O-methylcytidine-3'-phosphorothioate
  modified_base 21: mod_base = OTHER; note = 2'-O-methylcytidine
tcaataaatatccaaaccgcc

SEQ ID NO: 1313 - RNA, 19 nt, synthetic construct
  source 1..19: mol_type = other RNA
  modified_base 1: mod_base = OTHER; note = 2'-fluoroguanosine-3'-phosphorothioate
  modified_base 2: mod_base = OTHER; note = 2'-O-methyluridine-3'-phosphorothioate
  modified_base 3: mod_base = OTHER; note = 2'-fluorouridine-3'-phosphate
  modified_base 4: mod_base = OTHER; note = 2'-O-methyluridine-3'-phosphate
  modified_base 5: mod_base = OTHER; note = 2'-fluoroguanosine-3'-phosphate
  modified_base 6: mod_base = OTHER; note = 2'-O-methylguanosine-3'-phosphate
  modified_base 7: mod_base = OTHER; note = 2'-fluoroadenosine-3'-phosphate
  modified_base 8: mod_base = OTHER; note = 2'-O-methyluridine-3'-phosphate
  modified_base 9: mod_base = OTHER; note = 2'-fluoroadenosine-3'-phosphate
  modified_base 10: mod_base = OTHER; note = 2'-O-methyluridine-3'-phosphate
  modified_base 11: mod_base = OTHER; note = 2'-fluorouridine-3'-phosphate
  modified_base 12: mod_base = OTHER; note = 2'-O-methyluridine-3'-phosphate
  modified_base 13: mod_base = OTHER; note = 2'-fluoroadenosine-3'-phosphate
  modified_base 14: mod_base = OTHER; note = 2'-O-methyluridine-3'-phosphate
  modified_base 15: mod_base = OTHER; note = 2'-fluorouridine-3'-phosphate
  modified_base 16: mod_base = OTHER; note = 2'-O-methylguanosine-3'-phosphate
  modified_base 17: mod_base = OTHER; note = 2'-fluoroadenosine-3'-phosphorothioate
  modified_base 18: mod_base = OTHER; note = 2'-O-methylcytidine-3'-phosphorothioate
  modified_base 19: mod_base = OTHER; note 2'-fluorouridine-3'-phosphate-N,N'-((5S)-6-((6-hydroxy-5-(l ambda-3-methyl)hexyl)amino)-6-oxohexane-1,5-diyl)ditetradec anamide
gtttggatatttattgact

SEQ ID NO: 1314 - RNA, 21 nt, synthetic construct
  source 1..21: mol_type = other RNA
  modified_base 1: mod_base = OTHER; note 5'-(E)-vinylphosphonate-2'-O-methyladenosine-3'-phosphoroth ioate
  modified_base 2: mod_base = OTHER; note = 2'-fluoroguanosine-3'-phosphorothioate
  modified_base 3: mod_base = OTHER; note = 2'-O-methyluridine-3'-phosphate
  modified_base 4: mod_base = OTHER; note = 2'-fluorocytidine-3'-phosphate
  modified_base 5: mod_base = OTHER; note = 2'-O-methyladenosine-3'-phosphate
  modified_base 6: mod_base = OTHER; note = 2'-fluoroadenosine-3'-phosphate
  modified_base 7: mod_base = OTHER; note = 2'-O-methyluridine-3'-phosphate
  modified_base 8: mod_base = OTHER; note = 2'-fluoroadenosine-3'-phosphate
  modified_base 9: mod_base = OTHER; note = 2'-O-methyladenosine-3'-phosphate
  modified_base 10: mod_base = OTHER; note = 2'-fluoroadenosine-3'-phosphate
  modified_base 11: mod_base = OTHER; note = 2'-O-methyluridine-3'-phosphate
  modified_base 12: mod_base = OTHER; note = 2'-fluoroadenosine-3'-phosphate
  modified_base 13: mod_base = OTHER; note = 2'-O-methyluridine-3'-phosphate
  modified_base 14: mod_base = OTHER; note = 2'-fluorocytidine-3'-phosphate
  modified_base 15: mod_base = OTHER; note = 2'-O-methylcytidine-3'-phosphate
  modified_base 16: mod_base = OTHER; note = 2'-fluoroadenosine-3'-phosphate
  modified_base 17: mod_base = OTHER; note = 2'-O-methyladenosine-3'-phosphate
  modified_base 18: mod_base = OTHER; note = 2'-fluoroadenosine-3'-phosphate
  modified_base 19: mod_base = OTHER; note = 2'-O-methylcytidine-3'-phosphorothioate
  modified_base 20: mod_base = OTHER; note = 2'-O-methylcytidine-3'-phosphorothioate
  modified_base 21: mod_base = OTHER; note = 2'-O-methylguanosine
agtcaataaatatccaaaccg

SEQ ID NO: 1315 - RNA, 19 nt, synthetic construct
  source 1..19: mol_type = other RNA
  modified_base 1: mod_base = OTHER; note = 2'-fluoroguanosine-3'-phosphorothioate
  modified_base 2: mod_base = OTHER; note = 2'-O-methylguanosine-3'-phosphorothioate
  modified_base 3: mod_base = OTHER; note = 2'-fluoroadenosine-3'-phosphate
  modified_base 4: mod_base = OTHER; note = 2'-O-methyluridine-3'-phosphate
  modified_base 5: mod_base = OTHER; note = 2'-fluoroadenosine-3'-phosphate
  modified_base 6: mod_base = OTHER; note = 2'-O-methyluridine-3'-phosphate
  modified_base 7: mod_base = OTHER; note = 2'-fluorouridine-3'-phosphate
  modified_base 8: mod_base = OTHER; note = 2'-O-methyluridine-3'-phosphate
  modified_base 9: mod_base = OTHER; note = 2'-fluoroadenosine-3'-phosphate
  modified_base 10: mod_base = OTHER; note = 2'-O-methyluridine-3'-phosphate
  modified_base 11: mod_base = OTHER; note = 2'-fluorouridine-3'-phosphate
  modified_base 12: mod_base = OTHER; note = 2'-O-methylguanosine-3'-phosphate
  modified_base 13: mod_base = OTHER; note = 2'-fluoroadenosine-3'-phosphate
  modified_base 14: mod_base = OTHER; note = 2'-O-methylcytidine-3'-phosphate
  modified_base 15: mod_base = OTHER; note = 2'-fluorocytidine-3'-phosphate
  modified_base 16: mod_base = OTHER; note = 2'-O-methyluridine-3'-phosphate
  modified_base 17: mod_base = OTHER; note = 2'-fluorocytidine-3'-phosphorothioate
  modified_base 18: mod_base = OTHER; note = 2'-O-methylguanosine-3'-phosphorothioate
  modified_base 19: mod_base = OTHER; note 2'-fluorouridine-3'-phosphate-N,N'-((5S)-6-((6-hydroxy-5-(l ambda-3-methyl)hexyl)amino)-6-oxohexane-1,5-diyl)ditetradec anamide
ggatatttattgacctcgt

SEQ ID NO: 1316 - RNA, 21 nt, synthetic construct
  source 1..21: mol_type = other RNA
  modified_base 1: mod_base = OTHER; note 5'-(E)-vinylphosphonate-2'-O-methyladenosine-3'-phosphoroth ioate
  modified_base 2: mod_base = OTHER; note = 2'-fluorocytidine-3'-phosphorothioate
  modified_base 3: mod_base = OTHER; note = 2'-O-methylguanosine-3'-phosphate
  modified_base 4: mod_base = OTHER; note = 2'-fluoroadenosine-3'-phosphate
  modified_base 5: mod_base = OTHER; note = 2'-O-methylguanosine-3'-phosphate
  modified_base 6: mod_base = OTHER; note = 2'-fluoroguanosine-3'-phosphate
  modified_base 7: mod_base = OTHER; note = 2'-O-methyluridine-3'-phosphate
  modified_base 8: mod_base = OTHER; note = 2'-fluorocytidine-3'-phosphate
  modified_base 9: mod_base = OTHER; note = 2'-O-methyladenosine-3'-phosphate
  modified_base 10: mod_base = OTHER; note = 2'-fluoroadenosine-3'-phosphate
  modified_base 11: mod_base = OTHER; note = 2'-O-methyluridine-3'-phosphate
  modified_base 12: mod_base = OTHER; note = 2'-fluoroadenosine-3'-phosphate
  modified_base 13: mod_base = OTHER; note = 2'-O-methyladenosine-3'-phosphate
  modified_base 14: mod_base = OTHER; note = 2'-fluoroadenosine-3'-phosphate
  modified_base 15: mod_base = OTHER; note = 2'-O-methyluridine-3'-phosphate
  modified_base 16: mod_base = OTHER; note = 2'-fluoroadenosine-3'-phosphate
  modified_base 17: mod_base = OTHER; note = 2'-O-methyluridine-3'-phosphate
  modified_base 18: mod_base = OTHER; note = 2'-fluorocytidine-3'-phosphate
  modified_base 19: mod_base = OTHER; note = 2'-O-methylcytidine-3'-phosphorothioate
  modified_base 20: mod_base = OTHER; note = 2'-O-methyladenosine-3'-phosphorothioate
  modified_base 21: mod_base = OTHER; note = 2'-O-methyladenosine
acgaggtcaataaatatccaa

SEQ ID NO: 1317 - RNA, 19 nt, synthetic construct
  source 1..19: mol_type = other RNA
  modified_base 1: mod_base = OTHER; note = 2'-fluoroguanosine-3'-phosphorothioate
  modified_base 2: mod_base = OTHER; note = 2'-O-methyladenosine-3'-phosphorothioate
  modified_base 3: mod_base = OTHER; note = 2'-fluorouridine-3'-phosphate
  modified_base 4: mod_base = OTHER; note = 2'-O-methyladenosine-3'-phosphate
  modified_base 5: mod_base = OTHER; note = 2'-fluorouridine-3'-phosphate
  modified_base 6: mod_base = OTHER; note = 2'-O-methyluridine-3'-phosphate
  modified_base 7: mod_base = OTHER; note = 2'-fluorouridine-3'-phosphate
  modified_base 8: mod_base = OTHER; note = 2'-O-methyladenosine-3'-phosphate
  modified_base 9: mod_base = OTHER; note = 2'-fluorouridine-3'-phosphate
  modified_base 10: mod_base = OTHER; note = 2'-O-methyluridine-3'-phosphate
  modified_base 11: mod_base = OTHER; note = 2'-fluoroguanosine-3'-phosphate
  modified_base 12: mod_base = OTHER; note = 2'-O-methyladenosine-3'-phosphate
  modified_base 13: mod_base = OTHER; note = 2'-fluorocytidine-3'-phosphate
  modified_base 14: mod_base = OTHER; note = 2'-O-methylcytidine-3'-phosphate
  modified_base 15: mod_base = OTHER; note = 2'-fluorouridine-3'-phosphate
  modified_base 16: mod_base = OTHER; note = 2'-O-methylcytidine-3'-phosphate
  modified_base 17: mod_base = OTHER; note = 2'-fluoroguanosine-3'-phosphorothioate
  modified_base 18: mod_base = OTHER; note = 2'-O-methyluridine-3'-phosphorothioate
  modified_base 19: mod_base = OTHER; note 2'-fluoroadenosine-3'-phosphate-N,N'-((5S)-6-((6-hydroxy-5- (lambda-3-methyl)hexyl)amino)-6-oxohexane-1,5-diyl)ditetrad ecanamide
gatatttattgacctcgta

SEQ ID NO: 1318 - RNA, 21 nt, synthetic construct
  source 1..21: mol_type = other RNA
  modified_base 1: mod_base = OTHER; note 5'-(E)-vinylphosphonate-2'-O-methyluridine-3'-phosphorothio ate
  modified_base 2: mod_base = OTHER; note = 2'-fluoroadenosine-3'-phosphorothioate
  modified_base 3: mod_base = OTHER; note = 2'-O-methylcytidine-3'-phosphate
  modified_base 4: mod_base = OTHER; note = 2'-fluoroguanosine-3'-phosphate
  modified_base 5: mod_base = OTHER; note = 2'-O-methyladenosine-3'-phosphate
  modified_base 6: mod_base = OTHER; note = 2'-fluoroguanosine-3'-phosphate
  modified_base 7: mod_base = OTHER; note = 2'-O-methylguanosine-3'-phosphate
  modified_base 8: mod_base = OTHER; note = 2'-fluorouridine-3'-phosphate
  modified_base 9: mod_base = OTHER; note = 2'-O-methylcytidine-3'-phosphate
  modified_base 10: mod_base = OTHER; note = 2'-fluoroadenosine-3'-phosphate
  modified_base 11: mod_base = OTHER; note = 2'-O-methyladenosine-3'-phosphate
  modified_base 12: mod_base = OTHER; note = 2'-fluorouridine-3'-phosphate
  modified_base 13: mod_base = OTHER; note = 2'-O-methyladenosine-3'-phosphate
  modified_base 14: mod_base = OTHER; note = 2'-fluoroadenosine-3'-phosphate
  modified_base 15: mod_base = OTHER; note = 2'-O-methyladenosine-3'-phosphate
  modified_base 16: mod_base = OTHER; note = 2'-fluorouridine-3'-phosphate
  modified_base 17: mod_base = OTHER; note = 2'-O-methyladenosine-3'-phosphate
  modified_base 18: mod_base = OTHER; note = 2'-fluorouridine-3'-phosphate
  modified_base 19: mod_base = OTHER; note = 2'-O-methylcytidine-3'-phosphorothioate
  modified_base 20: mod_base = OTHER; note = 2'-O-methylcytidine-3'-phosphorothioate
  modified_base 21: mod_base = OTHER; note = 2'-O-methyladenosine
tacgaggtcaataaatatcca

SEQ ID NO: 1319 - RNA, 19 nt, synthetic construct
  source 1..19: mol_type = other RNA
  modified_base 1: mod_base = OTHER; note = 2'-fluorocytidine-3'-phosphorothioate
  modified_base 2: mod_base = OTHER; note = 2'-O-methylcytidine-3'-phosphorothioate
  modified_base 3: mod_base = OTHER; note = 2'-fluorocytidine-3'-phosphate
  modified_base 4: mod_base = OTHER; note = 2'-O-methyladenosine-3'-phosphate
  modified_base 5: mod_base = OTHER; note = 2'-fluoroadenosine-3'-phosphate
  modified_base 6: mod_base = OTHER; note = 2'-O-methyluridine-3'-phosphate
  modified_base 7: mod_base = OTHER; note = 2'-fluorocytidine-3'-phosphate
  modified_base 8: mod_base = OTHER; note = 2'-O-methylcytidine-3'-phosphate
  modified_base 9: mod_base = OTHER; note = 2'-fluoroadenosine-3'-phosphate
  modified_base 10: mod_base = OTHER; note = 2'-O-methylcytidine-3'-phosphate
  modified_base 11: mod_base = OTHER; note = 2'-fluoroguanosine-3'-phosphate
  modified_base 12: mod_base = OTHER; note = 2'-O-methyluridine-3'-phosphate
  modified_base 13: mod_base = OTHER; note = 2'-fluorouridine-3'-phosphate
  modified_base 14: mod_base = OTHER; note = 2'-O-methyluridine-3'-phosphate
  modified_base 15: mod_base = OTHER; note = 2'-fluorouridine-3'-phosphate
  modified_base 16: mod_base = OTHER; note = 2'-O-methylguanosine-3'-phosphate
  modified_base 17: mod_base = OTHER; note = 2'-fluoroguanosine-3'-phosphorothioate
  modified_base 18: mod_base = OTHER; note = 2'-O-methyladenosine-3'-phosphorothioate
  modified_base 19: mod_base = OTHER; note 2'-fluorouridine-3'-phosphate-N,N'-((5S)-6-((6-hydroxy-5-(l ambda-3-methyl)hexyl)amino)-6-oxohexane-1,5-diyl)ditetradec anamide
cccaatccacgttttggat

SEQ ID NO: 1320 - RNA, 21 nt, synthetic construct
  source 1..21: mol_type = other RNA
  modified_base 1: mod_base = OTHER; note 5'-(E)-vinylphosphonate-2'-O-methyladenosine-3'-phosphoroth ioate
  modified_base 2: mod_base = OTHER; note = 2'-fluorouridine-3'-phosphorothioate
  modified_base 3: mod_base = OTHER; note = 2'-O-methylcytidine-3'-phosphate
  modified_base 4: mod_base = OTHER; note = 2'-fluorocytidine-3'-phosphate
  modified_base 5: mod_base = OTHER; note = 2'-O-methyladenosine-3'-phosphate
  modified_base 6: mod_base = OTHER; note = 2'-fluoroadenosine-3'-phosphate
  modified_base 7: mod_base = OTHER; note = 2'-O-methyladenosine-3'-phosphate
  modified_base 8: mod_base = OTHER; note = 2'-fluoroadenosine-3'-phosphate
  modified_base 9: mod_base = OTHER; note = 2'-O-methylcytidine-3'-phosphate
  modified_base 10: mod_base = OTHER; note = 2'-fluoroguanosine-3'-phosphate
  modified_base 11: mod_base = OTHER; note = 2'-O-methyluridine-3'-phosphate
  modified_base 12: mod_base = OTHER; note = 2'-fluoroguanosine-3'-phosphate
  modified_base 13: mod_base = OTHER; note = 2'-O-methylguanosine-3'-phosphate
  modified_base 14: mod_base = OTHER; note = 2'-fluoroadenosine-3'-phosphate
  modified_base 15: mod_base = OTHER; note = 2'-O-methyluridine-3'-phosphate
  modified_base 16: mod_base = OTHER; note = 2'-fluorouridine-3'-phosphate
  modified_base 17: mod_base = OTHER; note = 2'-O-methylguanosine-3'-phosphate
  modified_base 18: mod_base = OTHER; note = 2'-fluoroguanosine-3'-phosphate
  modified_base 19: mod_base = OTHER; note = 2'-O-methylguanosine-3'-phosphorothioate
  modified_base 20: mod_base = OTHER; note = 2'-O-methyluridine-3'-phosphorothioate
  modified_base 21: mod_base = OTHER; note = 2'-O-methylguanosine
atccaaaacgtggattgggtg

SEQ ID NO: 1321 - RNA, 19 nt, synthetic construct
  source 1..19: mol_type = other RNA
  modified_base 1: mod_base = OTHER; note = 2'-fluoroadenosine-3'-phosphorothioate
  modified_base 2: mod_base = OTHER; note = 2'-O-methyluridine-3'-phosphorothioate
  modified_base 3: mod_base = OTHER; note = 2'-fluorocytidine-3'-phosphate
  modified_base 4: mod_base = OTHER; note = 2'-O-methylcytidine-3'-phosphate
  modified_base 5: mod_base = OTHER; note = 2'-fluoroadenosine-3'-phosphate
  modified_base 6: mod_base = OTHER; note = 2'-O-methylcytidine-3'-phosphate
  modified_base 7: mod_base = OTHER; note = 2'-fluoroguanosine-3'-phosphate
  modified_base 8: mod_base = OTHER; note = 2'-O-methyluridine-3'-phosphate
  modified_base 9: mod_base = OTHER; note = 2'-fluorouridine-3'-phosphate
  modified_base 10: mod_base = OTHER; note = 2'-O-methyluridine-3'-phosphate
  modified_base 11: mod_base = OTHER; note = 2'-fluorouridine-3'-phosphate
  modified_base 12: mod_base = OTHER; note = 2'-O-methylguanosine-3'-phosphate
  modified_base 13: mod_base = OTHER; note = 2'-fluoroguanosine-3'-phosphate
  modified_base 14: mod_base = OTHER; note = 2'-O-methyladenosine-3'-phosphate
  modified_base 15: mod_base = OTHER; note = 2'-fluorouridine-3'-phosphate
  modified_base 16: mod_base = OTHER; note = 2'-O-methylguanosine-3'-phosphate
  modified_base 17: mod_base = OTHER; note = 2'-fluorocytidine-3'-phosphorothioate
  modified_base 18: mod_base = OTHER; note = 2'-O-methyladenosine-3'-phosphorothioate
  modified_base 19: mod_base = OTHER; note 2'-fluorouridine-3'-phosphate-N,N'-((5S)-6-((6-hydroxy-5-(l ambda-3-methyl)hexyl)amino)-6-oxohexane-1,5-diyl)ditetradec anamide
atccacgttttggatgcat

SEQ ID NO: 1322 - RNA, 21 nt, synthetic construct
  source 1..21: mol_type = other RNA
  modified_base 1: mod_base = OTHER; note 5'-(E)-vinylphosphonate-2'-O-methyladenosine-3'-phosphoroth ioate
  modified_base 2: mod_base = OTHER; note = 2'-fluorouridine-3'-phosphorothioate
  modified_base 3: mod_base = OTHER; note = 2'-O-methylguanosine-3'-phosphate
  modified_base 4: mod_base = OTHER; note = 2'-fluorocytidine-3'-phosphate
  modified_base 5: mod_base = OTHER; note = 2'-O-methyladenosine-3'-phosphate
  modified_base 6: mod_base = OTHER; note = 2'-fluorouridine-3'-phosphate
  modified_base 7: mod_base = OTHER; note = 2'-O-methylcytidine-3'-phosphate
  modified_base 8: mod_base = OTHER; note = 2'-fluorocytidine-3'-phosphate
  modified_base 9: mod_base = OTHER; note = 2'-O-methyladenosine-3'-phosphate
  modified_base 10: mod_base = OTHER; note = 2'-fluoroadenosine-3'-phosphate
  modified_base 11: mod_base = OTHER; note = 2'-O-methyladenosine-3'-phosphate
  modified_base 12: mod_base = OTHER; note = 2'-fluoroadenosine-3'-phosphate
  modified_base 13: mod_base = OTHER; note = 2'-O-methylcytidine-3'-phosphate
  modified_base 14: mod_base = OTHER; note = 2'-fluoroguanosine-3'-phosphate
  modified_base 15: mod_base = OTHER; note = 2'-O-methyluridine-3'-phosphate
  modified_base 16: mod_base = OTHER; note = 2'-fluoroguanosine-3'-phosphate
  modified_base 17: mod_base = OTHER; note = 2'-O-methylguanosine-3'-phosphate
  modified_base 18: mod_base = OTHER; note = 2'-fluoroadenosine-3'-phosphate
  modified_base 19: mod_base = OTHER; note = 2'-O-methyluridine-3'-phosphorothioate
  modified_base 20: mod_base = OTHER; note = 2'-O-methyluridine-3'-phosphorothioate
  modified_base 21: mod_base = OTHER; note = 2'-O-methylguanosine
atgcatccaaaacgtggattg

SEQ ID NO: 1323 - RNA, 19 nt, synthetic construct
  source 1..19: mol_type = other RNA
  modified_base 1: mod_base = OTHER; note = 2'-fluorocytidine-3'-phosphorothioate
  modified_base 2: mod_base = OTHER; note = 2'-O-methylcytidine-3'-phosphorothioate
  modified_base 3: mod_base = OTHER; note = 2'-fluoroadenosine-3'-phosphate
  modified_base 4: mod_base = OTHER; note = 2'-O-methylcytidine-3'-phosphate
  modified_base 5: mod_base = OTHER; note = 2'-fluoroguanosine-3'-phosphate
  modified_base 6: mod_base = OTHER; note = 2'-O-methyluridine-3'-phosphate
  modified_base 7: mod_base = OTHER; note = 2'-fluorouridine-3'-phosphate
  modified_base 8: mod_base = OTHER; note = 2'-O-methyluridine-3'-phosphate
  modified_base 9: mod_base = OTHER; note = 2'-fluorouridine-3'-phosphate
  modified_base 10: mod_base = OTHER; note = 2'-O-methylguanosine-3'-phosphate
  modified_base 11: mod_base = OTHER; note = 2'-fluoroguanosine-3'-phosphate
  modified_base 12: mod_base = OTHER; note = 2'-O-methyladenosine-3'-phosphate
  modified_base 13: mod_base = OTHER; note = 2'-fluorouridine-3'-phosphate
  modified_base 14: mod_base = OTHER; note = 2'-O-methylguanosine-3'-phosphate
  modified_base 15: mod_base = OTHER; note = 2'-fluorocytidine-3'-phosphate
  modified_base 16: mod_base = OTHER; note = 2'-O-methyladenosine-3'-phosphate
  modified_base 17: mod_base = OTHER; note = 2'-fluorocytidine-3'-phosphorothioate
  modified_base 18: mod_base = OTHER; note = 2'-O-methyluridine-3'-phosphorothioate
  modified_base 19: mod_base = OTHER; note 2'-fluorouridine-3'-phosphate-N,N'-((5S)-6-((6-hydroxy-5-(l ambda-3-methyl)hexyl)amino)-6-oxohexane-1,5-diyl)ditetradec anamide
ccacgttttggatgcactt

SEQ ID NO: 1324 - RNA, 21 nt, synthetic construct
  source 1..21: mol_type = other RNA
  modified_base 1: mod_base = OTHER; note 5'-(E)-vinylphosphonate-2'-O-methyladenosine-3'-phosphoroth ioate
  modified_base 2: mod_base = OTHER; note = 2'-fluoroadenosine-3'-phosphorothioate
  modified_base 3: mod_base = OTHER; note = 2'-O-methylguanosine-3'-phosphate
  modified_base 4: mod_base = OTHER; note = 2'-fluorouridine-3'-phosphate
  modified_base 5: mod_base = OTHER; note = 2'-O-methylguanosine-3'-phosphate
  modified_base 6: mod_base = OTHER; note = 2'-fluorocytidine-3'-phosphate
  modified_base 7: mod_base = OTHER; note = 2'-O-methyladenosine-3'-phosphate
  modified_base 8: mod_base = OTHER; note = 2'-fluorouridine-3'-phosphate
  modified_base 9: mod_base = OTHER; note = 2'-O-methylcytidine-3'-phosphate
  modified_base 10: mod_base = OTHER; note = 2'-fluorocytidine-3'-phosphate
  modified_base 11: mod_base = OTHER; note = 2'-O-methyladenosine-3'-phosphate
  modified_base 12: mod_base = OTHER; note = 2'-fluoroadenosine-3'-phosphate
  modified_base 13: mod_base = OTHER; note = 2'-O-methyladenosine-3'-phosphate
  modified_base 14: mod_base = OTHER; note = 2'-fluoroadenosine-3'-phosphate
  modified_base 15: mod_base = OTHER; note = 2'-O-methylcytidine-3'-phosphate
  modified_base 16: mod_base = OTHER; note = 2'-fluoroguanosine-3'-phosphate
  modified_base 17: mod_base = OTHER; note = 2'-O-methyluridine-3'-phosphate
  modified_base 18: mod_base = OTHER; note = 2'-fluoroguanosine-3'-phosphate
  modified_base 19: mod_base = OTHER; note = 2'-O-methylguanosine-3'-phosphorothioate
  modified_base 20: mod_base = OTHER; note = 2'-O-methyladenosine-3'-phosphorothioate
  modified_base 21: mod_base = OTHER; note = 2'-O-methyluridine
aagtgcatccaaaacgtggat

SEQ ID NO: 1325 - RNA, 19 nt, synthetic construct
  source 1..19: mol_type = other RNA
  modified_base 1: mod_base = OTHER; note = 2'-fluorocytidine-3'-phosphorothioate
  modified_base 2: mod_base = OTHER; note = 2'-O-methylguanosine-3'-phosphorothioate
  modified_base 3: mod_base = OTHER; note = 2'-fluorouridine-3'-phosphate
  modified_base 4: mod_base = OTHER; note = 2'-O-methyluridine-3'-phosphate
  modified_base 5: mod_base = OTHER; note = 2'-fluorouridine-3'-phosphate
  modified_base 6: mod_base = OTHER; note = 2'-O-methyluridine-3'-phosphate
  modified_base 7: mod_base = OTHER; note = 2'-fluoroguanosine-3'-phosphate
  modified_base 8: mod_base = OTHER; note = 2'-O-methylguanosine-3'-phosphate
  modified_base 9: mod_base = OTHER; note = 2'-fluoroadenosine-3'-phosphate
  modified_base 10: mod_base = OTHER; note = 2'-O-methyluridine-3'-phosphate
  modified_base 11: mod_base = OTHER; note = 2'-fluoroguanosine-3'-phosphate
  modified_base 12: mod_base = OTHER; note = 2'-O-methylcytidine-3'-phosphate
  modified_base 13: mod_base = OTHER; note = 2'-fluoroadenosine-3'-phosphate
  modified_base 14: mod_base = OTHER; note = 2'-O-methylcytidine-3'-phosphate
  modified_base 15: mod_base = OTHER; note = 2'-fluorouridine-3'-phosphate
  modified_base 16: mod_base = OTHER; note = 2'-O-methylguanosine-3'-phosphate
  modified_base 17: mod_base = OTHER; note = 2'-fluoroadenosine-3'-phosphorothioate
  modified_base 18: mod_base = OTHER; note = 2'-O-methylguanosine-3'-phosphorothioate
  modified_base 19: mod_base = OTHER; note 2'-fluoroadenosine-3'-phosphate-N,N'-((5S)-6-((6-hydroxy-5- (lambda-3-methyl)hexyl)amino)-6-oxohexane-1,5-diyl)ditetrad ecanamide
cgttttggatgcactgaga

SEQ ID NO: 1326 - RNA, 21 nt, synthetic construct
  source 1..21: mol_type = other RNA
  modified_base 1: mod_base = OTHER; note 5'-(E)-vinylphosphonate-2'-O-methyluridine-3'-phosphorothio ate
  modified_base 2: mod_base = OTHER; note = 2'-fluorocytidine-3'-phosphorothioate
  modified_base 3: mod_base = OTHER; note = 2'-O-methyluridine-3'-phosphate
  modified_base 4: mod_base = OTHER; note = 2'-fluorocytidine-3'-phosphate
  modified_base 5: mod_base = OTHER; note = 2'-O-methyladenosine-3'-phosphate
  modified_base 6: mod_base = OTHER; note = 2'-fluoroguanosine-3'-phosphate
  modified_base 7: mod_base = OTHER; note = 2'-O-methyluridine-3'-phosphate
  modified_base 8: mod_base = OTHER; note = 2'-fluoroguanosine-3'-phosphate
  modified_base 9: mod_base = OTHER; note = 2'-O-methylcytidine-3'-phosphate
  modified_base 10: mod_base = OTHER; note = 2'-fluoroadenosine-3'-phosphate
  modified_base 11: mod_base = OTHER; note = 2'-O-methyluridine-3'-phosphate
  modified_base 12: mod_base = OTHER; note = 2'-fluorocytidine-3'-phosphate
  modified_base 13: mod_base = OTHER; note = 2'-O-methylcytidine-3'-phosphate
  modified_base 14: mod_base = OTHER; note = 2'-fluoroadenosine-3'-phosphate
  modified_base 15: mod_base = OTHER; note = 2'-O-methyladenosine-3'-phosphate
  modified_base 16: mod_base = OTHER; note = 2'-fluoroadenosine-3'-phosphate
  modified_base 17: mod_base = OTHER; note = 2'-O-methyladenosine-3'-phosphate
  modified_base 18: mod_base = OTHER; note = 2'-fluorocytidine-3'-phosphate
  modified_base 19: mod_base = OTHER; note = 2'-O-methylguanosine-3'-phosphorothioate
  modified_base 20: mod_base = OTHER; note = 2'-O-methyluridine-3'-phosphorothioate
  modified_base 21: mod_base = OTHER; note = 2'-O-methylguanosine
tctcagtgcatccaaaacgtg

SEQ ID NO: 1327 - RNA, 21 nt, synthetic construct
  source 1..21: mol_type = other RNA
  modified_base 1: mod_base = OTHER; note = 2'-O-methylcytidine-3'-phosphorothioate
  modified_base 2: mod_base = OTHER; note = 2'-fluorocytidine-3'-phosphorothioate
  modified_base 3: mod_base = OTHER; note = 2'-fluorouridine-3'-phosphate
  modified_base 4: mod_base = OTHER; note = 2'-O-methylcytidine-3'-phosphate
  modified_base 5: mod_base = OTHER; note = 2'-fluoroguanosine-3'-phosphate
  modified_base 6: mod_base = OTHER; note = 2'-O-methylguanosine-3'-phosphate
  modified_base 7: mod_base = OTHER; note = 2'-fluorouridine-3'-phosphate
  modified_base 8: mod_base = OTHER; note = 2'-O-methyladenosine-3'-phosphate
  modified_base 9: mod_base = OTHER; note = 2'-fluorouridine-3'-phosphate
  modified_base 10: mod_base = OTHER; note = 2'-O-methyluridine-3'-phosphate
  modified_base 11: mod_base = OTHER; note = 2'-fluorouridine-3'-phosphate
  modified_base 12: mod_base = OTHER; note = 2'-O-methyladenosine-3'-phosphate
  modified_base 13: mod_base = OTHER; note = 2'-fluorouridine-3'-phosphate
  modified_base 14: mod_base = OTHER; note = 2'-O-methyluridine-3'-phosphate
  modified_base 15: mod_base = OTHER; note = 2'-fluoroguanosine-3'-phosphate
  modified_base 16: mod_base = OTHER; note = 2'-O-methyluridine-3'-phosphate
  modified_base 17: mod_base = OTHER; note = 2'-fluorocytidine-3'-phosphate
  modified_base 18: mod_base = OTHER; note = 2'-O-methyluridine-3'-phosphate
  modified_base 19: mod_base = OTHER; note = 2'-fluoroguanosine-3'-phosphorothioate
  modified_base 20: mod_base = OTHER; note = 2'-O-methyluridine-3'-phosphorothioate
  modified_base 21: mod_base = OTHER; note 2'-fluorouridine-3'-phosphate-N,N'-((5S)-6-((6-hydroxy-5-(l ambda-3-methyl)hexyl)amino)-6-oxohexane-1,5-diyl)ditetradec anamide
cctcggtatttattgtctgtt

SEQ ID NO: 1328 - RNA, 23 nt, synthetic construct
  source 1..23: mol_type = other RNA
  modified_base 1: mod_base = OTHER; note 5'-(E)-vinylphosphonate-2'-O-methyladenosine-3'-phosphoroth ioate
  modified_base 2: mod_base = OTHER; note = 2'-fluoroadenosine-3'-phosphorothioate
  modified_base 3: mod_base = OTHER; note = 2'-O-methylcytidine-3'-phosphate
  modified_base 4: mod_base = OTHER; note = 2'-fluoroadenosine-3'-phosphate
  modified_base 5: mod_base = OTHER; note = 2'-O-methylguanosine-3'-phosphate
  modified_base 6: mod_base = OTHER; note = 2'-fluoroadenosine-3'-phosphate
  modified_base 7: mod_base = OTHER; note = 2'-O-methylcytidine-3'-phosphate
  modified_base 8: mod_base = OTHER; note = 2'-fluoroadenosine-3'-phosphate
  modified_base 9: mod_base = OTHER; note = 2'-O-methyladenosine-3'-phosphate
  modified_base 10: mod_base = OTHER; note = 2'-fluorouridine-3'-phosphate
  modified_base 11: mod_base = OTHER; note = 2'-O-methyladenosine-3'-phosphate
  modified_base 12: mod_base = OTHER; note = 2'-fluoroadenosine-3'-phosphate
  modified_base 13: mod_base = OTHER; note = 2'-O-methyladenosine-3'-phosphate
  modified_base 14: mod_base = OTHER; note = 2'-fluorouridine-3'-phosphate
  modified_base 15: mod_base = OTHER; note = 2'-O-methyladenosine-3'-phosphate
  modified_base 16: mod_base = OTHER; note = 2'-fluorocytidine-3'-phosphate
  modified_base 17: mod_base = OTHER; note = 2'-O-methylcytidine-3'-phosphate
  modified_base 18: mod_base = OTHER; note = 2'-fluoroguanosine-3'-phosphate
  modified_base 19: mod_base = OTHER; note = 2'-O-methyladenosine-3'-phosphate
  modified_base 20: mod_base = OTHER; note = 2'-fluoroguanosine-3'-phosphate
  modified_base 21: mod_base = OTHER; note = 2'-O-methylguanosine-3'-phosphorothioate
  modified_base 22: mod_base = OTHER; note = 2'-O-methyladenosine-3'-phosphorothioate
  modified_base 23: mod_base = OTHER; note = 2'-O-methyladenosine
aacagacaataaataccgaggaa

SEQ ID NO: 1329 - RNA, 19 nt, synthetic construct
  source 1..19: mol_type = other RNA
  modified_base 1: mod_base = OTHER; note = 2'-O-methylguanosine-3'-phosphorothioate
  modified_base 2: mod_base = OTHER; note = 2'-O-methylguanosine-3'-phosphorothioate
  modified_base 3: mod_base = OTHER; note = 2'-O-methyluridine-3'-phosphate
  modified_base 4: mod_base = OTHER; note = 2'-O-methylcytidine-3'-phosphate
  modified_base 5: mod_base = OTHER; note = 2'-fluoroadenosine-3'-phosphate
  modified_base 6: mod_base = OTHER; note = 2'-O-methyluridine-3'-phosphate
  modified_base 7: mod_base = OTHER; note = 2'-fluoroguanosine-3'-phosphate
  modified_base 8: mod_base = OTHER; note = 2'-fluoroguanosine-3'-phosphate
  modified_base 9: mod_base = OTHER; note = 2'-fluoroadenosine-3'-phosphate
  modified_base 10: mod_base = OTHER; note = 2'-O-methylguanosine-3'-phosphate
  modified_base 11: mod_base = OTHER; note = 2'-O-methyluridine-3'-phosphate
  modified_base 12: mod_base = OTHER; note = 2'-O-methyladenosine-3'-phosphate
  modified_base 13: mod_base = OTHER; note = 2'-O-methyluridine-3'-phosphate
  modified_base 14: mod_base = OTHER; note = 2'-O-methyluridine-3'-phosphate
  modified_base 15: mod_base = OTHER; note = 2'-O-methyladenosine-3'-phosphate
  modified_base 16: mod_base = OTHER; note = 2'-O-methylcytidine-3'-phosphate
  modified_base 17: mod_base = OTHER; note = 2'-O-methylguanosine-3'-phosphorothioate
  modified_base 18: mod_base = OTHER; note = 2'-O-methyluridine-3'-phosphorothioate
  modified_base 19: mod_base = OTHER; note 2'-O-methyluridine-3'-phosphate-N,N'-((5S)-6-((6-hydroxy-5- (lambda-3-methyl)hexyl)amino)-6-oxohexane-1,5-diyl)ditetrad ecanamide
ggtcatggagtattacgtt

SEQ ID NO: 1330 - RNA, 21 nt, synthetic construct
  source 1..21: mol_type = other RNA
  modified_base 1: mod_base = OTHER; note 5'-(E)-vinylphosphonate-2'-O-methyladenosine-3'-phosphoroth ioate
  modified_base 2: mod_base = OTHER; note = 2'-fluoroadenosine-3'-phosphorothioate
  modified_base 3: mod_base = OTHER; note = 2'-O-methylcytidine-3'-phosphate
  modified_base 4: mod_base = OTHER; note = 2'-O-methylguanosine-3'-phosphate
  modified_base 5: mod_base = OTHER; note = 2'-O-methyluridine-3'-phosphate
  modified_base 6: mod_base = OTHER; note = 2'-fluoroadenosine-3'-phosphate
  modified_base 7: mod_base = OTHER; note = 2'-O-methyladenosine-3'-phosphate
  modified_base 8: mod_base = OTHER; note = 2'-O-methyluridine-3'-phosphate
  modified_base 9: mod_base = OTHER; note = 2'-O-methyladenosine-3'-phosphate
  modified_base 10: mod_base = OTHER; note = 2'-O-methylcytidine-3'-phosphate
  modified_base 11: mod_base = OTHER; note = 2'-O-methyluridine-3'-phosphate
  modified_base 12: mod_base = OTHER; note = 2'-O-methylcytidine-3'-phosphate
  modified_base 13: mod_base = OTHER; note = 2'-O-methylcytidine-3'-phosphate
  modified_base 14: mod_base = OTHER; note = 2'-fluoroadenosine-3'-phosphate
  modified_base 15: mod_base = OTHER; note = 2'-O-methyluridine-3'-phosphate
  modified_base 16: mod_base = OTHER; note = 2'-fluoroguanosine-3'-phosphate
  modified_base 17: mod_base = OTHER; note = 2'-O-methyladenosine-3'-phosphate
  modified_base 18: mod_base = OTHER; note = 2'-O-methylcytidine-3'-phosphate
  modified_base 19: mod_base = OTHER; note = 2'-O-methylcytidine-3'-phosphorothioate
  modified_base 20: mod_base = OTHER; note = 2'-O-methyladenosine-3'-phosphorothioate
  modified_base 21: mod_base = OTHER; note = 2'-O-methylguanosine
aacgtaatactccatgaccag

SEQ ID NO: 1331 - RNA, 19 nt, synthetic construct
  source 1..19: mol_type = other RNA
  modified_base 1: mod_base = OTHER; note = 2'-O-methylguanosine-3'-phosphorothioate
  modified_base 2: mod_base = OTHER; note = 2'-O-methylguanosine-3'-phosphorothioate
  modified_base 3: mod_base = OTHER; note = 2'-O-methyluridine-3'-phosphate
  modified_base 4: mod_base = OTHER; note = 2'-O-methylcytidine-3'-phosphate
  modified_base 5: mod_base = OTHER; note = 2'-fluoroadenosine-3'-phosphate
  modified_base 6: mod_base = OTHER; note = 2'-O-methyluridine-3'-phosphate
  modified_base 7: mod_base = OTHER; note = 2'-fluoroguanosine-3'-phosphate
  modified_base 8: mod_base = OTHER; note = 2'-fluoroguanosine-3'-phosphate
  modified_base 9: mod_base = OTHER; note = 2'-fluoroadenosine-3'-phosphate
  modified_base 10: mod_base = OTHER; note = 2'-O-methylguanosine-3'-phosphate
  modified_base 11: mod_base = OTHER; note = 2'-O-methyluridine-3'-phosphate
  modified_base 12: mod_base = OTHER; note = 2'-O-methyladenosine-3'-phosphate
  modified_base 13: mod_base = OTHER; note = 2'-O-methyluridine-3'-phosphate
  modified_base 14: mod_base = OTHER; note = 2'-O-methyluridine-3'-phosphate
  modified_base 15: mod_base = OTHER; note = 2'-O-methyladenosine-3'-phosphate
  modified_base 16: mod_base = OTHER; note = 2'-O-methylcytidine-3'-phosphate
  modified_base 17: mod_base = OTHER; note = 2'-O-methylguanosine-3'-phosphorothioate
  modified_base 18: mod_base = OTHER; note = 2'-O-methyluridine-3'-phosphorothioate
  modified_base 19: mod_base = OTHER; note 2'-O-methyluridine-3'-phosphate-N,N'-((5S)-6-((6-hydroxy-5- (lambda-3-methyl)hexyl)amino)-6-oxohexane-1,5-diyl)ditetrad ecanamide
ggtcatggagtattacgtt

SEQ ID NO: 1332 - RNA, 21 nt, synthetic construct
  source 1..21: mol_type = other RNA
  modified_base 1: mod_base = OTHER; note 5'-(E)-vinylphosphonate-2'-O-methyluridine-3'-phosphorothio ate
  modified_base 2: mod_base = OTHER; note = 2'-fluoroadenosine-3'-phosphorothioate
  modified_base 3: mod_base = OTHER; note = 2'-O-methylcytidine-3'-phosphate
  modified_base 4: mod_base = OTHER; note = 2'-O-methylguanosine-3'-phosphate
  modified_base 5: mod_base = OTHER; note = 2'-O-methyluridine-3'-phosphate
  modified_base 6: mod_base = OTHER; note = 2'-fluoroadenosine-3'-phosphate
  modified_base 7: mod_base = OTHER; note = 2'-O-methyladenosine-3'-phosphate
  modified_base 8: mod_base = OTHER; note = 2'-O-methyluridine-3'-phosphate
  modified_base 9: mod_base = OTHER; note = 2'-O-methyladenosine-3'-phosphate
  modified_base 10: mod_base = OTHER; note = 2'-O-methylcytidine-3'-phosphate
  modified_base 11: mod_base = OTHER; note = 2'-O-methyluridine-3'-phosphate
  modified_base 12: mod_base = OTHER; note = 2'-O-methylcytidine-3'-phosphate
  modified_base 13: mod_base = OTHER; note = 2'-O-methylcytidine-3'-phosphate
  modified_base 14: mod_base = OTHER; note = 2'-fluoroadenosine-3'-phosphate
  modified_base 15: mod_base = OTHER; note = 2'-O-methyluridine-3'-phosphate
  modified_base 16: mod_base = OTHER; note = 2'-fluoroguanosine-3'-phosphate
  modified_base 17: mod_base = OTHER; note = 2'-O-methyladenosine-3'-phosphate
  modified_base 18: mod_base = OTHER; note = 2'-O-methylcytidine-3'-phosphate
  modified_base 19: mod_base = OTHER; note = 2'-O-methylcytidine-3'-phosphorothioate
  modified_base 20: mod_base = OTHER; note = 2'-O-methyladenosine-3'-phosphorothioate
  modified_base 21: mod_base = OTHER; note = 2'-O-methylguanosine
tacgtaatactccatgaccag

SEQ ID NO: 1333 - RNA, 19 nt, synthetic construct
  source 1..19: mol_type = other RNA
  modified_base 1: mod_base = OTHER; note = 2'-O-methylguanosine-3'-phosphorothioate
  modified_base 2: mod_base = OTHER; note = 2'-O-methyladenosine-3'-phosphorothioate
  modified_base 3: mod_base = OTHER; note = 2'-O-methyluridine-3'-phosphate
  modified_base 4: mod_base = OTHER; note = 2'-O-methyladenosine-3'-phosphate
  modified_base 5: mod_base = OTHER; note = 2'-fluorouridine-3'-phosphate
  modified_base 6: mod_base = OTHER; note = 2'-O-methyluridine-3'-phosphate
  modified_base 7: mod_base = OTHER; note = 2'-fluorouridine-3'-phosphate
  modified_base 8: mod_base = OTHER; note = 2'-fluoroadenosine-3'-phosphate
  modified_base 9: mod_base = OTHER; note = 2'-fluorouridine-3'-phosphate
  modified_base 10: mod_base = OTHER; note = 2'-O-methyluridine-3'-phosphate
  modified_base 11: mod_base = OTHER; note = 2'-O-methylguanosine-3'-phosphate
  modified_base 12: mod_base = OTHER; note = 2'-O-methyladenosine-3'-phosphate
  modified_base 13: mod_base = OTHER; note = 2'-O-methylcytidine-3'-phosphate
  modified_base 14: mod_base = OTHER; note = 2'-O-methylcytidine-3'-phosphate
  modified_base 15: mod_base = OTHER; note = 2'-O-methyluridine-3'-phosphate
  modified_base 16: mod_base = OTHER; note = 2'-O-methylcytidine-3'-phosphate
  modified_base 17: mod_base = OTHER; note = 2'-O-methylguanosine-3'-phosphorothioate
  modified_base 18: mod_base = OTHER; note = 2'-O-methyluridine-3'-phosphorothioate
  modified_base 19: mod_base = OTHER; note 2'-O-methyladenosine-3'-phosphate-N,N'-((5S)-6-((6-hydroxy- 5-(lambda-3-methyl)hexyl)amino)-6-oxohexane-1,5-diyl)ditetr adecanamide
gatatttattgacctcgta

SEQ ID NO: 1334 - RNA, 21 nt, synthetic construct
  source 1..21: mol_type = other RNA
  modified_base 1: mod_base = OTHER; note 5'-(E)-vinylphosphonate-2'-O-methyluridine-3'-phosphorothio ate
  modified_base 2: mod_base = OTHER; note = 2'-fluoroadenosine-3'-phosphorothioate
  modified_base 3: mod_base = OTHER; note = 2'-O-methylcytidine-3'-phosphate
  modified_base 4: mod_base = OTHER; note = 2'-O-methylguanosine-3'-phosphate
  modified_base 5: mod_base = OTHER; note = 2'-O-methyladenosine-3'-phosphate
  modified_base 6: mod_base = OTHER; note = 2'-fluoroguanosine-3'-phosphate
  modified_base 7: mod_base = OTHER; note = 2'-O-methylguanosine-3'-phosphate
  modified_base 8: mod_base = OTHER; note = 2'-O-methyluridine-3'-phosphate
  modified_base 9: mod_base = OTHER; note = 2'-O-methylcytidine-3'-phosphate
  modified_base 10: mod_base = OTHER; note = 2'-O-methyladenosine-3'-phosphate
  modified_base 11: mod_base = OTHER; note = 2'-O-methyladenosine-3'-phosphate
  modified_base 12: mod_base = OTHER; note = 2'-O-methyluridine-3'-phosphate
  modified_base 13: mod_base = OTHER; note = 2'-O-methyladenosine-3'-phosphate
  modified_base 14: mod_base = OTHER; note = 2'-fluoroadenosine-3'-phosphate
  modified_base 15: mod_base = OTHER; note = 2'-O-methyladenosine-3'-phosphate
  modified_base 16: mod_base = OTHER; note = 2'-fluorouridine-3'-phosphate
  modified_base 17: mod_base = OTHER; note = 2'-O-methyladenosine-3'-phosphate
  modified_base 18: mod_base = OTHER; note = 2'-O-methyluridine-3'-phosphate
  modified_base 19: mod_base = OTHER; note = 2'-O-methylcytidine-3'-phosphorothioate
  modified_base 20: mod_base = OTHER; note = 2'-O-methylcytidine-3'-phosphorothioate
  modified_base 21: mod_base = OTHER; note = 2'-O-methyladenosine
tacgaggtcaataaatatcca

SEQ ID NO: 1335 - RNA, 20 nt, synthetic construct
  source 1..20: mol_type = other RNA
  modified_base 1: mod_base = OTHER; note = 2'-O-methylguanosine-3'-phosphorothioate
  modified_base 2: mod_base = OTHER; note = 2'-O-methylguanosine-3'-phosphorothioate
  modified_base 3: mod_base = OTHER; note = 2'-O-methyladenosine-3'-phosphate
  modified_base 4: mod_base = OTHER; note = 2'-O-methyluridine-3'-phosphate
  modified_base 5: mod_base = OTHER; note = 2'-O-methyladenosine-3'-phosphate
  modified_base 6: mod_base = OTHER; note = 2'-fluorouridine-3'-phosphate
  modified_base 7: mod_base = OTHER; note = 2'-O-methyluridine-3'-phosphate
  modified_base 8: mod_base = OTHER; note = 2'-fluorouridine-3'-phosphate
  modified_base 9: mod_base = OTHER; note = 2'-fluoroadenosine-3'-phosphate
  modified_base 10: mod_base = OTHER; note = 2'-fluorouridine-3'-phosphate
  modified_base 11: mod_base = OTHER; note = 2'-O-methyluridine-3'-phosphate
  modified_base 12: mod_base = OTHER; note = 2'-O-methylguanosine-3'-phosphate
  modified_base 13: mod_base = OTHER; note = 2'-O-methyladenosine-3'-phosphate
  modified_base 14: mod_base = OTHER; note = 2'-O-methylcytidine-3'-phosphate
  modified_base 15: mod_base = OTHER; note = 2'-O-methylcytidine-3'-phosphate
  modified_base 16: mod_base = OTHER; note = 2'-O-methyluridine-3'-phosphate
  modified_base 17: mod_base = OTHER; note = 2'-O-methylcytidine-3'-phosphate
  modified_base 18: mod_base = OTHER; note = 2'-O-methylguanosine-3'-phosphorothioate
  modified_base 19: mod_base = OTHER; note = 2'-O-methyluridine-3'-phosphorothioate
  modified_base 20: mod_base = OTHER; note 2'-O-methyladenosine-3'-phosphate-N,N'-((5S)-6-((6-hydroxy- 5-(lambda-3-methyl)hexyl)amino)-6-oxohexane-1,5-diyl)ditetr adecanamide
ggatatttattgacctcgta

SEQ ID NO: 1336 - RNA, 22 nt, synthetic construct
  source 1..22: mol_type = other RNA
  modified_base 1: mod_base = OTHER; note 5'-(E)-vinylphosphonate-2'-O-methyluridine-3'-phosphorothio ate
  modified_base 2: mod_base = OTHER; note = 2'-fluoroadenosine-3'-phosphorothioate
  modified_base 3: mod_base = OTHER; note = 2'-O-methylcytidine-3'-phosphate
  modified_base 4: mod_base = OTHER; note = 2'-O-methylguanosine-3'-phosphate
  modified_base 5: mod_base = OTHER; note = 2'-O-methyladenosine-3'-phosphate
  modified_base 6: mod_base = OTHER; note = 2'-fluoroguanosine-3'-phosphate
  modified_base 7: mod_base = OTHER; note = 2'-O-methylguanosine-3'-phosphate
  modified_base 8: mod_base = OTHER; note = 2'-O-methyluridine-3'-phosphate
  modified_base 9: mod_base = OTHER; note = 2'-O-methylcytidine-3'-phosphate
  modified_base 10: mod_base = OTHER; note = 2'-O-methyladenosine-3'-phosphate
  modified_base 11: mod_base = OTHER; note = 2'-O-methyladenosine-3'-phosphate
  modified_base 12: mod_base = OTHER; note = 2'-O-methyluridine-3'-phosphate
  modified_base 13: mod_base = OTHER; note = 2'-O-methyladenosine-3'-phosphate
  modified_base 14: mod_base = OTHER; note = 2'-fluoroadenosine-3'-phosphate
  modified_base 15: mod_base = OTHER; note = 2'-O-methyladenosine-3'-phosphate
  modified_base 16: mod_base = OTHER; note = 2'-fluorouridine-3'-phosphate
  modified_base 17: mod_base = OTHER; note = 2'-O-methyladenosine-3'-phosphate
  modified_base 18: mod_base = OTHER; note = 2'-O-methyluridine-3'-phosphate
  modified_base 19: mod_base = OTHER; note = 2'-O-methylcytidine-3'-phosphate
  modified_base 20: mod_base = OTHER; note = 2'-O-methylcytidine-3'-phosphorothioate
  modified_base 21: mod_base = OTHER; note = 2'-O-methyladenosine-3'-phosphorothioate
  modified_base 22: mod_base = OTHER; note = 2'-O-methyladenosine
tacgaggtcaataaatatccaa

SEQ ID NO: 1337 - RNA, 21 nt, synthetic construct
  source 1..21: mol_type = other RNA
  modified_base 1: mod_base = OTHER; note = 2'-O-methyluridine-3'-phosphorothioate
  modified_base 2: mod_base = OTHER; note = 2'-O-methylguanosine-3'-phosphorothioate
  modified_base 3: mod_base = OTHER; note = 2'-O-methylguanosine-3'-phosphate
  modified_base 4: mod_base = OTHER; note = 2'-O-methyladenosine-3'-phosphate
  modified_base 5: mod_base = OTHER; note = 2'-O-methyluridine-3'-phosphate
  modified_base 6: mod_base = OTHER; note = 2'-O-methyladenosine-3'-phosphate
  modified_base 7: mod_base = OTHER; note = 2'-fluorouridine-3'-phosphate
  modified_base 8: mod_base = OTHER; note = 2'-O-methyluridine-3'-phosphate
  modified_base 9: mod_base = OTHER; note = 2'-fluorouridine-3'-phosphate
  modified_base 10: mod_base = OTHER; note = 2'-fluoroadenosine-3'-phosphate
  modified_base 11: mod_base = OTHER; note = 2'-fluorouridine-3'-phosphate
  modified_base 12: mod_base = OTHER; note = 2'-O-methyluridine-3'-phosphate
  modified_base 13: mod_base = OTHER; note = 2'-O-methylguanosine-3'-phosphate
  modified_base 14: mod_base = OTHER; note = 2'-O-methyladenosine-3'-phosphate
  modified_base 15: mod_base = OTHER; note = 2'-O-methylcytidine-3'-phosphate
  modified_base 16: mod_base = OTHER; note = 2'-O-methylcytidine-3'-phosphate
  modified_base 17: mod_base = OTHER; note = 2'-O-methyluridine-3'-phosphate
  modified_base 18: mod_base = OTHER; note = 2'-O-methylcytidine-3'-phosphate
  modified_base 19: mod_base = OTHER; note = 2'-O-methylguanosine-3'-phosphorothioate
  modified_base 20: mod_base = OTHER; note = 2'-O-methyluridine-3'-phosphorothioate
  modified_base 21: mod_base = OTHER; note 2'-O-methyladenosine-3'-phosphate-N,N'-((5S)-6-((6-hydroxy- 5-(lambda-3-methyl)hexyl)amino)-6-oxohexane-1,5-diyl)ditetr adecanamide
tggatatttattgacctcgta

SEQ ID NO: 1338 - RNA, 23 nt, synthetic construct
  source 1..23: mol_type = other RNA
  modified_base 1: mod_base = OTHER; note 5'-(E)-vinylphosphonate-2'-O-methyluridine-3'-phosphorothio ate
  modified_base 2: mod_base = OTHER; note = 2'-fluoroadenosine-3'-phosphorothioate
  modified_base 3: mod_base = OTHER; note = 2'-O-methylcytidine-3'-phosphate
  modified_base 4: mod_base = OTHER; note = 2'-O-methylguanosine-3'-phosphate
  modified_base 5: mod_base = OTHER; note = 2'-O-methyladenosine-3'-phosphate
  modified_base 6: mod_base = OTHER; note = 2'-fluoroguanosine-3'-phosphate
  modified_base 7: mod_base = OTHER; note = 2'-O-methylguanosine-3'-phosphate
  modified_base 8: mod_base = OTHER; note = 2'-O-methyluridine-3'-phosphate
  modified_base 9: mod_base = OTHER; note = 2'-O-methylcytidine-3'-phosphate
  modified_base 10: mod_base = OTHER; note = 2'-O-methyladenosine-3'-phosphate
  modified_base 11: mod_base = OTHER; note = 2'-O-methyladenosine-3'-phosphate
  modified_base 12: mod_base = OTHER; note = 2'-O-methyluridine-3'-phosphate
  modified_base 13: mod_base = OTHER; note = 2'-O-methyladenosine-3'-phosphate
  modified_base 14: mod_base = OTHER; note = 2'-fluoroadenosine-3'-phosphate
  modified_base 15: mod_base = OTHER; note = 2'-O-methyladenosine-3'-phosphate
  modified_base 16: mod_base = OTHER; note = 2'-fluorouridine-3'-phosphate
  modified_base 17: mod_base = OTHER; note = 2'-O-methyladenosine-3'-phosphate
  modified_base 18: mod_base = OTHER; note = 2'-O-methyluridine-3'-phosphate
  modified_base 19: mod_base = OTHER; note = 2'-O-methylcytidine-3'-phosphate
  modified_base 20: mod_base = OTHER; note = 2'-O-methylcytidine-3'-phosphate
  modified_base 21: mod_base = OTHER; note = 2'-O-methyladenosine-3'-phosphorothioate
  modified_base 22: mod_base = OTHER; note = 2'-O-methyladenosine-3'-phosphorothioate
  modified_base 23: mod_base = OTHER; note = 2'-O-methyladenosine
tacgaggtcaataaatatccaaa

SEQ ID NO: 1339 - RNA, 21 nt, synthetic construct
  source 1..21: mol_type = other RNA
  modified_base 1: mod_base = OTHER; note = 2'-O-methylguanosine-3'-phosphorothioate
  modified_base 2: mod_base = OTHER; note = 2'-O-methylguanosine-3'-phosphorothioate
  modified_base 3: mod_base = OTHER; note = 2'-O-methyladenosine-3'-phosphate
  modified_base 4: mod_base = OTHER; note = 2'-O-methyluridine-3'-phosphate
  modified_base 5: mod_base = OTHER; note = 2'-O-methyladenosine-3'-phosphate
  modified_base 6: mod_base = OTHER; note = 2'-O-methyluridine-3'-phosphate
  modified_base 7: mod_base = OTHER; note = 2'-fluorouridine-3'-phosphate
  modified_base 8: mod_base = OTHER; note = 2'-O-methyluridine-3'-phosphate
  modified_base 9: mod_base = OTHER; note = 2'-fluoroadenosine-3'-phosphate
  modified_base 10: mod_base = OTHER; note = 2'-fluorouridine-3'-phosphate
  modified_base 11: mod_base = OTHER; note = 2'-fluorouridine-3'-phosphate
  modified_base 12: mod_base = OTHER; note = 2'-O-methylguanosine-3'-phosphate
  modified_base 13: mod_base = OTHER; note = 2'-O-methyladenosine-3'-phosphate
  modified_base 14: mod_base = OTHER; note = 2'-O-methylcytidine-3'-phosphate
  modified_base 15: mod_base = OTHER; note = 2'-O-methylcytidine-3'-phosphate
  modified_base 16: mod_base = OTHER; note = 2'-O-methyluridine-3'-phosphate
  modified_base 17: mod_base = OTHER; note = 2'-O-methylcytidine-3'-phosphate
  modified_base 18: mod_base = OTHER; note = 2'-O-methylguanosine-3'-phosphate
  modified_base 19: mod_base = OTHER; note = 2'-O-methyluridine-3'-phosphorothioate
  modified_base 20: mod_base = OTHER; note = 2'-O-methylcytidine-3'-phosphorothioate
  modified_base 21: mod_base = OTHER; note 2'-O-methyladenosine-3'-phosphate-N,N'-((5S)-6-((6-hydroxy- 5-(lambda-3-methyl)hexyl)amino)-6-oxohexane-1,5-diyl)ditetr adecanamide
ggatatttattgacctcgtca

SEQ ID NO: 1340 - RNA, 23 nt, synthetic construct
  source 1..23: mol_type = other RNA
  modified_base 1: mod_base = OTHER; note 5'-(E)-vinylphosphonate-2'-O-methyluridine-3'-phosphorothio ate
  modified_base 2: mod_base = OTHER; note = 2'-fluoroguanosine-3'-phosphorothioate
  modified_base 3: mod_base = OTHER; note = 2'-O-methyladenosine-3'-phosphate
  modified_base 4: mod_base = OTHER; note = 2'-O-methylcytidine-3'-phosphate
  modified_base 5: mod_base = OTHER; note = 2'-O-methylguanosine-3'-phosphate
  modified_base 6: mod_base = OTHER; note = 2'-fluoroadenosine-3'-phosphate
  modified_base 7: mod_base = OTHER; note = 2'-O-methylguanosine-3'-phosphate
  modified_base 8: mod_base = OTHER; note = 2'-O-methylguanosine-3'-phosphate
  modified_base 9: mod_base = OTHER; note = 2'-O-methyluridine-3'-phosphate
  modified_base 10: mod_base = OTHER; note = 2'-O-methylcytidine-3'-phosphate
  modified_base 11: mod_base = OTHER; note = 2'-O-methyladenosine-3'-phosphate
  modified_base 12: mod_base = OTHER; note = 2'-O-methyladenosine-3'-phosphate
  modified_base 13: mod_base = OTHER; note = 2'-O-methyluridine-3'-phosphate
  modified_base 14: mod_base = OTHER; note = 2'-fluoroadenosine-3'-phosphate
  modified_base 15: mod_base = OTHER; note = 2'-O-methyladenosine-3'-phosphate
  modified_base 16: mod_base = OTHER; note = 2'-fluoroadenosine-3'-phosphate
  modified_base 17: mod_base = OTHER; note = 2'-O-methyluridine-3'-phosphate
  modified_base 18: mod_base = OTHER; note = 2'-O-methyladenosine-3'-phosphate
  modified_base 19: mod_base = OTHER; note = 2'-O-methyluridine-3'-phosphate
  modified_base 20: mod_base = OTHER; note = 2'-O-methylcytidine-3'-phosphate
  modified_base 21: mod_base = OTHER; note = 2'-O-methylcytidine-3'-phosphorothioate
  modified_base 22: mod_base = OTHER; note = 2'-O-methyladenosine-3'-phosphorothioate
  modified_base 23: mod_base = OTHER; note = 2'-O-methyladenosine
tgacgaggtcaataaatatccaa

SEQ ID NO: 1341 - RNA, 19 nt, synthetic construct
  source 1..19: mol_type = other RNA
  modified_base 1: mod_base = OTHER; note = 2'-O-methylguanosine-3'-phosphorothioate
  modified_base 2: mod_base = OTHER; note = 2'-O-methyladenosine-3'-phosphorothioate
  modified_base 3: mod_base = OTHER; note = 2'-O-methyluridine-3'-phosphate
  modified_base 4: mod_base = OTHER; note = 2'-O-methyladenosine-3'-phosphate
  modified_base 5: mod_base = OTHER; note = 2'-fluorouridine-3'-phosphate
  modified_base 6: mod_base = OTHER; note = 2'-O-methyluridine-3'-phosphate
  modified_base 7: mod_base = OTHER; note = 2'-fluorouridine-3'-phosphate
  modified_base 8: mod_base = OTHER; note = 2'-fluoroadenosine-3'-phosphate
  modified_base 9: mod_base = OTHER; note = 2'-fluorouridine-3'-phosphate
  modified_base 10: mod_base = OTHER; note = 2'-O-methyluridine-3'-phosphate
  modified_base 11: mod_base = OTHER; note = 2'-O-methylguanosine-3'-phosphate
  modified_base 12: mod_base = OTHER; note = 2'-O-methyladenosine-3'-phosphate
  modified_base 13: mod_base = OTHER; note = 2'-O-methylcytidine-3'-phosphate
  modified_base 14: mod_base = OTHER; note = 2'-O-methylcytidine-3'-phosphate
  modified_base 15: mod_base = OTHER; note = 2'-O-methyluridine-3'-phosphate
  modified_base 16: mod_base = OTHER; note = 2'-O-methylcytidine-3'-phosphate
  modified_base 17: mod_base = OTHER; note = 2'-O-methylguanosine-3'-phosphate
  modified_base 18: mod_base = OTHER; note = 2'-O-methyluridine-3'-phosphate
  modified_base 19: mod_base = OTHER; note 2'-O-methyladenosine-3'-phosphate-N,N'-((5S)-6-((6-hydroxy- 5-(lambda-3-methyl)hexyl)amino)-6-oxohexane-1,5-diyl)ditetr adecanamide
gatatttattgacctcgta

SEQ ID NO: 1342 - RNA, 21 nt, synthetic construct
  source 1..21: mol_type = other RNA
  modified_base 1: mod_base = OTHER; note 5'-(E)-vinylphosphonate-2'-O-methyluridine-3'-phosphorothio ate
  modified_base 2: mod_base = OTHER; note = 2'-fluoroadenosine-3'-phosphorothioate
  modified_base 3: mod_base = OTHER; note = 2'-O-methylcytidine-3'-phosphate
  modified_base 4: mod_base = OTHER; note = 2'-O-methylguanosine-3'-phosphate
  modified_base 5: mod_base = OTHER; note = 2'-O-methyladenosine-3'-phosphate
  modified_base 6: mod_base = OTHER; note = 2'-fluoroguanosine-3'-phosphate
  modified_base 7: mod_base = OTHER; note = 2'-O-methylguanosine-3'-phosphate
  modified_base 8: mod_base = OTHER; note = 2'-O-methyluridine-3'-phosphate
  modified_base 9: mod_base = OTHER; note = 2'-O-methylcytidine-3'-phosphate
  modified_base 10: mod_base = OTHER; note = 2'-O-methyladenosine-3'-phosphate
  modified_base 11: mod_base = OTHER; note = 2'-O-methyladenosine-3'-phosphate
  modified_base 12: mod_base = OTHER; note = 2'-O-methyluridine-3'-phosphate
  modified_base 13: mod_base = OTHER; note = 2'-O-methyladenosine-3'-phosphate
  modified_base 14: mod_base = OTHER; note = 2'-fluoroadenosine-3'-phosphate
  modified_base 15: mod_base = OTHER; note = 2'-O-methyladenosine-3'-phosphate
  modified_base 16: mod_base = OTHER; note = 2'-fluorouridine-3'-phosphate
  modified_base 17: mod_base = OTHER; note = 2'-O-methyladenosine-3'-phosphate
  modified_base 18: mod_base = OTHER; note = 2'-O-methyluridine-3'-phosphate
  modified_base 19: mod_base = OTHER; note = 2'-O-methylcytidine-3'-phosphorothioate
  modified_base 20: mod_base = OTHER; note = 2'-O-methylcytidine-3'-phosphorothioate
  modified_base 21: mod_base = OTHER; note = 2'-O-methyladenosine
tacgaggtcaataaatatcca

SEQ ID NO: 1343 - RNA, 21 nt, synthetic construct
  source 1..21: mol_type = other RNA
  modified_base 1: mod_base = OTHER; note = 2'-O-methyluridine-3'-phosphorothioate
  modified_base 2: mod_base = OTHER; note = 2'-O-methylguanosine-3'-phosphorothioate
  modified_base 3: mod_base = OTHER; note = 2'-O-methylguanosine-3'-phosphate
  modified_base 4: mod_base = OTHER; note = 2'-O-methyladenosine-3'-phosphate
  modified_base 5: mod_base = OTHER; note = 2'-O-methyluridine-3'-phosphate
  modified_base 6: mod_base = OTHER; note = 2'-O-methyladenosine-3'-phosphate
  modified_base 7: mod_base = OTHER; note = 2'-fluorouridine-3'-phosphate
  modified_base 8: mod_base = OTHER; note = 2'-O-methyluridine-3'-phosphate
  modified_base 9: mod_base = OTHER; note = 2'-fluorouridine-3'-phosphate
  modified_base 10: mod_base = OTHER; note = 2'-fluoroadenosine-3'-phosphate
  modified_base 11: mod_base = OTHER; note = 2'-fluorouridine-3'-phosphate
  modified_base 12: mod_base = OTHER; note = 2'-O-methyluridine-3'-phosphate
  modified_base 13: mod_base = OTHER; note = 2'-O-methylguanosine-3'-phosphate
  modified_base 14: mod_base = OTHER; note = 2'-O-methyladenosine-3'-phosphate
  modified_base 15: mod_base = OTHER; note = 2'-O-methylcytidine-3'-phosphate
  modified_base 16: mod_base = OTHER; note = 2'-O-methylcytidine-3'-phosphate
  modified_base 17: mod_base = OTHER; note = 2'-O-methyluridine-3'-phosphate
  modified_base 18: mod_base = OTHER; note = 2'-O-methylcytidine-3'-phosphate
  modified_base 19: mod_base = OTHER; note = 2'-O-methylguanosine-3'-phosphate
  modified_base 20: mod_base = OTHER; note = 2'-O-methyluridine-3'-phosphate
  modified_base 21: mod_base = OTHER; note 2'-O-methyladenosine-3'-phosphate-N,N'-((5S)-6-((6-hydroxy- 5-(lambda-3-methyl)hexyl)amino)-6-oxohexane-1,5-diyl)ditetr adecanamide
tggatatttattgacctcgta

SEQ ID NO: 1344 - RNA, 23 nt, synthetic construct
  source 1..23: mol_type = other RNA
  modified_base 1: mod_base = OTHER; note 5'-(E)-vinylphosphonate-2'-O-methyluridine-3'-phosphorothio ate
  modified_base 2: mod_base = OTHER; note = 2'-fluoroadenosine-3'-phosphorothioate
  modified_base 3: mod_base = OTHER; note = 2'-O-methylcytidine-3'-phosphate
  modified_base 4: mod_base = OTHER; note = 2'-O-methylguanosine-3'-phosphate
  modified_base 5: mod_base = OTHER; note = 2'-O-methyladenosine-3'-phosphate
  modified_base 6: mod_base = OTHER; note = 2'-fluoroguanosine-3'-phosphate
  modified_base 7: mod_base = OTHER; note = 2'-O-methylguanosine-3'-phosphate
  modified_base 8: mod_base = OTHER; note = 2'-O-methyluridine-3'-phosphate
  modified_base 9: mod_base = OTHER; note = 2'-O-methylcytidine-3'-phosphate
  modified_base 10: mod_base = OTHER; note = 2'-O-methyladenosine-3'-phosphate
  modified_base 11: mod_base = OTHER; note = 2'-O-methyladenosine-3'-phosphate
  modified_base 12: mod_base = OTHER; note = 2'-O-methyluridine-3'-phosphate
  modified_base 13: mod_base = OTHER; note = 2'-O-methyladenosine-3'-phosphate
  modified_base 14: mod_base = OTHER; note = 2'-fluoroadenosine-3'-phosphate
  modified_base 15: mod_base = OTHER; note = 2'-O-methyladenosine-3'-phosphate
  modified_base 16: mod_base = OTHER; note = 2'-fluorouridine-3'-phosphate
  modified_base 17: mod_base = OTHER; note = 2'-O-methyladenosine-3'-phosphate
  modified_base 18: mod_base = OTHER; note = 2'-O-methyluridine-3'-phosphate
  modified_base 19: mod_base = OTHER; note = 2'-O-methylcytidine-3'-phosphate
  modified_base 20: mod_base = OTHER; note = 2'-O-methylcytidine-3'-phosphate
  modified_base 21: mod_base = OTHER; note = 2'-O-methyladenosine-3'-phosphorothioate
  modified_base 22: mod_base = OTHER; note = 2'-O-methyladenosine-3'-phosphorothioate
  modified_base 23: mod_base = OTHER; note = 2'-O-methyladenosine
tacgaggtcaataaatatccaaa

SEQ ID NO: 1345 - RNA, 19 nt, synthetic construct
  source 1..19: mol_type = other RNA
  modified_base 1: mod_base = OTHER; note = 2'-O-methylcytidine-3'-phosphorothioate
  modified_base 2: mod_base = OTHER; note = 2'-O-methylguanosine-3'-phosphorothioate
  modified_base 3: mod_base = OTHER; note = 2'-O-methylguanosine-3'-phosphate
  modified_base 4: mod_base = OTHER; note = 2'-O-methyluridine-3'-phosphate
  modified_base 5: mod_base = OTHER; note = 2'-fluorouridine-3'-phosphate
  modified_base 6: mod_base = OTHER; note = 2'-O-methyluridine-3'-phosphate
  modified_base 7: mod_base = OTHER; note = 2'-fluoroguanosine-3'-phosphate
  modified_base 8: mod_base = OTHER; note = 2'-O-methylguanosine-3'-phosphate
  modified_base 9: mod_base = OTHER; note = 2'-fluoroadenosine-3'-phosphate
  modified_base 10: mod_base = OTHER; note = 2'-O-methyluridine-3'-phosphate
  modified_base 11: mod_base = OTHER; note = 2'-fluoroadenosine-3'-phosphate
  modified_base 12: mod_base = OTHER; note = 2'-O-methyluridine-3'-phosphate
  modified_base 13: mod_base = OTHER; note = 2'-fluorouridine-3'-phosphate
  modified_base 14: mod_base = OTHER; note = 2'-O-methyluridine-3'-phosphate
  modified_base 15: mod_base = OTHER; note = 2'-fluoroadenosine-3'-phosphate
  modified_base 16: mod_base = OTHER; note = 2'-O-methyluridine-3'-phosphate
  modified_base 17: mod_base = OTHER; note = 2'-O-methyluridine-3'-phosphorothioate
  modified_base 18: mod_base = OTHER; note = 2'-O-methylguanosine-3'-phosphorothioate
  modified_base 19: mod_base = OTHER; note 2'-O-methyladenosine-3'-phosphate-N,N'-((5S)-6-((6-hydroxy- 5-(lambda-3-methyl)hexyl)amino)-6-oxohexane-1,5-diyl)ditetr adecanamide
cggtttggatatttattga

SEQ ID NO: 1346 - RNA, 21 nt, synthetic construct
  source 1..21: mol_type = other RNA
  modified_base 1: mod_base = OTHER; note 5'-(E)-vinylphosphonate-2'-O-methyluridine-3'-phosphorothio ate
  modified_base 2: mod_base = OTHER; note = 2'-fluorocytidine-3'-phosphorothioate
  modified_base 3: mod_base = OTHER; note = 2'-O-methyladenosine-3'-phosphate
  modified_base 4: mod_base = OTHER; note = 2'-fluoroadenosine-3'-phosphate
  modified_base 5: mod_base = OTHER; note = 2'-O-methyluridine-3'-phosphate
  modified_base 6: mod_base = OTHER; note = 2'-fluoroadenosine-3'-phosphate
  modified_base 7: mod_base = OTHER; note = 2'-O-methyladenosine-3'-phosphate
  modified_base 8: mod_base = OTHER; note = 2'-fluoroadenosine-3'-phosphate
  modified_base 9: mod_base = OTHER; note = 2'-O-methyluridine-3'-phosphate
  modified_base 10: mod_base = OTHER; note = 2'-fluoroadenosine-3'-phosphate
  modified_base 11: mod_base = OTHER; note = 2'-O-methyluridine-3'-phosphate
  modified_base 12: mod_base = OTHER; note = 2'-fluorocytidine-3'-phosphate
  modified_base 13: mod_base = OTHER; note = 2'-O-methylcytidine-3'-phosphate
  modified_base 14: mod_base = OTHER; note = 2'-fluoroadenosine-3'-phosphate
  modified_base 15: mod_base = OTHER; note = 2'-O-methyladenosine-3'-phosphate
  modified_base 16: mod_base = OTHER; note = 2'-fluoroadenosine-3'-phosphate
  modified_base 17: mod_base = OTHER; note = 2'-O-methylcytidine-3'-phosphate
  modified_base 18: mod_base = OTHER; note = 2'-O-methylcytidine-3'-phosphate
  modified_base 19: mod_base = OTHER; note = 2'-O-methylguanosine-3'-phosphorothioate
  modified_base 20: mod_base = OTHER; note = 2'-O-methylcytidine-3'-phosphorothioate
  modified_base 21: mod_base = OTHER; note = 2'-O-methylcytidine
tcaataaatatccaaaccgcc

SEQ ID NO: 1347 - RNA, 19 nt, synthetic construct
  source 1..19: mol_type = other RNA
  modified_base 1: mod_base = OTHER; note = 2'-O-methylcytidine-3'-phosphorothioate
  modified_base 2: mod_base = OTHER; note = 2'-O-methylguanosine-3'-phosphorothioate
  modified_base 3: mod_base = OTHER; note = 2'-O-methylguanosine-3'-phosphate
  modified_base 4: mod_base = OTHER; note = 2'-O-methyluridine-3'-phosphate
  modified_base 5: mod_base = OTHER; note = 2'-fluorouridine-3'-phosphate
  modified_base 6: mod_base = OTHER; note = 2'-O-methyluridine-3'-phosphate
  modified_base 7: mod_base = OTHER; note = 2'-O-methylguanosine-3'-phosphate
  modified_base 8: mod_base = OTHER; note = 2'-fluoroguanosine-3'-phosphate
  modified_base 9: mod_base = OTHER; note = 2'-fluoroadenosine-3'-phosphate
  modified_base 10: mod_base = OTHER; note = 2'-O-methyluridine-3'-phosphate
  modified_base 11: mod_base = OTHER; note = 2'-fluoroadenosine-3'-phosphate
  modified_base 12: mod_base = OTHER; note = 2'-O-methyluridine-3'-phosphate
  modified_base 13: mod_base = OTHER; note = 2'-fluorouridine-3'-phosphate
  modified_base 14: mod_base = OTHER; note = 2'-O-methyluridine-3'-phosphate
  modified_base 15: mod_base = OTHER; note = 2'-O-methyladenosine-3'-phosphate
  modified_base 16: mod_base = OTHER; note = 2'-O-methyluridine-3'-phosphate
  modified_base 17: mod_base = OTHER; note = 2'-O-methyluridine-3'-phosphorothioate
  modified_base 18: mod_base = OTHER; note = 2'-O-methylguanosine-3'-phosphorothioate
  modified_base 19: mod_base = OTHER; note 2'-O-methyladenosine-3'-phosphate-N,N'-((5S)-6-((6-hydroxy- 5-(lambda-3-methyl)hexyl)amino)-6-oxohexane-1,5-diyl)ditetr adecanamide
cggtttggatatttattga

SEQ ID NO: 1348 - RNA, 21 nt, synthetic construct
  source 1..21: mol_type = other RNA
  modified_base 1: mod_base = OTHER; note 5'-(E)-vinylphosphonate-2'-O-methyluridine-3'-phosphorothio ate
  modified_base 2: mod_base = OTHER; note = 2'-fluorocytidine-3'-phosphorothioate
  modified_base 3: mod_base = OTHER; note = 2'-O-methyladenosine-3'-phosphate
  modified_base 4: mod_base = OTHER; note = 2'-O-methyladenosine-3'-phosphate
  modified_base 5: mod_base = OTHER; note = 2'-O-methyluridine-3'-phosphate
  modified_base 6: mod_base = OTHER; note = 2'-fluoroadenosine-3'-phosphate
  modified_base 7: mod_base = OTHER; note = 2'-O-methyladenosine-3'-phosphate
  modified_base 8: mod_base = OTHER; note = 2'-O-methyladenosine-3'-phosphate
  modified_base 9: mod_base = OTHER; note = 2'-O-methyluridine-3'-phosphate
  modified_base 10: mod_base = OTHER; note = 2'-fluoroadenosine-3'-phosphate
  modified_base 11: mod_base = OTHER; note = 2'-O-methyluridine-3'-phosphate
  modified_base 12: mod_base = OTHER; note = 2'-fluorocytidine-3'-phosphate
  modified_base 13: mod_base = OTHER; note = 2'-O-methylcytidine-3'-phosphate
  modified_base 14: mod_base = OTHER; note = 2'-fluoroadenosine-3'-phosphate
  modified_base 15: mod_base = OTHER; note = 2'-O-methyladenosine-3'-phosphate
  modified_base 16: mod_base = OTHER; note = 2'-fluoroadenosine-3'-phosphate
  modified_base 17: mod_base = OTHER; note = 2'-O-methylcytidine-3'-phosphate
  modified_base 18: mod_base = OTHER; note = 2'-O-methylcytidine-3'-phosphate
  modified_base 19: mod_base = OTHER; note = 2'-O-methylguanosine-3'-phosphorothioate
  modified_base 20: mod_base = OTHER; note = 2'-O-methylcytidine-3'-phosphorothioate
  modified_base 21: mod_base = OTHER; note = 2'-O-methylcytidine
tcaataaatatccaaaccgcc

SEQ ID NO: 1349 - RNA, 19 nt, synthetic construct
  source 1..19: mol_type = other RNA
  modified_base 1: mod_base = OTHER; note = 2'-O-methylcytidine-3'-phosphorothioate
  modified_base 2: mod_base = OTHER; note = 2'-O-methylguanosine-3'-phosphorothioate
  modified_base 3: mod_base = OTHER; note = 2'-O-methylguanosine-3'-phosphate
  modified_base 4: mod_base = OTHER; note = 2'-O-methyluridine-3'-phosphate
  modified_base 5: mod_base = OTHER; note = 2'-fluorouridine-3'-phosphate
  modified_base 6: mod_base = OTHER; note = 2'-O-methyluridine-3'-phosphate
  modified_base 7: mod_base = OTHER; note = 2'-fluoroguanosine-3'-phosphate
  modified_base 8: mod_base = OTHER; note = 2'-fluoroguanosine-3'-phosphate
  modified_base 9: mod_base = OTHER; note = 2'-fluoroadenosine-3'-phosphate
  modified_base 10: mod_base = OTHER; note = 2'-O-methyluridine-3'-phosphate
  modified_base 11: mod_base = OTHER; note = 2'-O-methyladenosine-3'-phosphate
  modified_base 12: mod_base = OTHER; note = 2'-O-methyluridine-3'-phosphate
  modified_base 13: mod_base = OTHER; note = 2'-O-methyluridine-3'-phosphate
  modified_base 14: mod_base = OTHER; note = 2'-O-methyluridine-3'-phosphate
  modified_base 15: mod_base = OTHER; note = 2'-O-methyladenosine-3'-phosphate
  modified_base 16: mod_base = OTHER; note = 2'-O-methyluridine-3'-phosphate
  modified_base 17: mod_base = OTHER; note = 2'-O-methyluridine-3'-phosphorothioate
  modified_base 18: mod_base = OTHER; note = 2'-O-methylguanosine-3'-phosphorothioate
  modified_base 19: mod_base = OTHER; note 2'-O-methyladenosine-3'-phosphate-N,N'-((5S)-6-((6-hydroxy- 5-(lambda-3-methyl)hexyl)amino)-6-oxohexane-1,5-diyl)ditetr adecanamide
cggtttggatatttattga

SEQ ID NO: 1350 - RNA, 21 nt, synthetic construct
  source 1..21: mol_type = other RNA
  modified_base 1: mod_base = OTHER; note 5'-(E)-vinylphosphonate-2'-O-methyluridine-3'-phosphorothio ate
  modified_base 2: mod_base = OTHER; note = 2'-fluorocytidine-3'-phosphorothioate
  modified_base 3: mod_base = OTHER; note = 2'-O-methyladenosine-3'-phosphate
  modified_base 4: mod_base = OTHER; note = 2'-O-methyladenosine-3'-phosphate
  modified_base 5: mod_base = OTHER; note = 2'-O-methyluridine-3'-phosphate
  modified_base 6: mod_base = OTHER; note = 2'-fluoroadenosine-3'-phosphate
  modified_base 7: mod_base = OTHER; note = 2'-O-methyladenosine-3'-phosphate
  modified_base 8: mod_base = OTHER; note = 2'-O-methyladenosine-3'-phosphate
  modified_base 9: mod_base = OTHER; note = 2'-O-methyluridine-3'-phosphate
  modified_base 10: mod_base = OTHER; note = 2'-O-methyladenosine-3'-phosphate
  modified_base 11: mod_base = OTHER; note = 2'-O-methyluridine-3'-phosphate
  modified_base 12: mod_base = OTHER; note = 2'-O-methylcytidine-3'-phosphate
  modified_base 13: mod_base = OTHER; note = 2'-O-methylcytidine-3'-phosphate
  modified_base 14: mod_base = OTHER; note = 2'-fluoroadenosine-3'-phosphate
  modified_base 15: mod_base = OTHER; note = 2'-O-methyladenosine-3'-phosphate
  modified_base 16: mod_base = OTHER; note = 2'-fluoroadenosine-3'-phosphate
  modified_base 17: mod_base = OTHER; note = 2'-O-methylcytidine-3'-phosphate
  modified_base 18: mod_base = OTHER; note = 2'-O-methylcytidine-3'-phosphate
  modified_base 19: mod_base = OTHER; note = 2'-O-methylguanosine-3'-phosphorothioate
  modified_base 20: mod_base = OTHER; note = 2'-O-methylcytidine-3'-phosphorothioate
  modified_base 21: mod_base = OTHER; note = 2'-O-methylcytidine
tcaataaatatccaaaccgcc

SEQ ID NO: 1351 - RNA, 19 nt, synthetic construct
  source 1..19: mol_type = other RNA
  modified_base 1: mod_base = OTHER; note = 2'-O-methylcytidine-3'-phosphorothioate
  modified_base 2: mod_base = OTHER; note = 2'-O-methylguanosine-3'-phosphorothioate
  modified_base 3: mod_base = OTHER; note = 2'-O-methylguanosine-3'-phosphate
  modified_base 4: mod_base = OTHER; note = 2'-O-methyluridine-3'-phosphate
  modified_base 5: mod_base = OTHER; note = 2'-fluorouridine-3'-phosphate
  modified_base 6: mod_base = OTHER; note = 2'-O-methyluridine-3'-phosphate
  modified_base 7: mod_base = OTHER; note = 2'-fluoroguanosine-3'-phosphate
  modified_base 8: mod_base = OTHER; note = 2'-fluoroguanosine-3'-phosphate
  modified_base 9: mod_base = OTHER; note = 2'-fluoroadenosine-3'-phosphate
  modified_base 10: mod_base = OTHER; note = 2'-O-methyluridine-3'-phosphate
  modified_base 11: mod_base = OTHER; note = 2'-O-methyladenosine-3'-phosphate
  modified_base 12: mod_base = OTHER; note = 2'-O-methyluridine-3'-phosphate
  modified_base 13: mod_base = OTHER; note = 2'-O-methyluridine-3'-phosphate
  modified_base 14: mod_base = OTHER; note = 2'-O-methyluridine-3'-phosphate
  modified_base 15: mod_base = OTHER; note = 2'-O-methyladenosine-3'-phosphate
  modified_base 16: mod_base = OTHER; note = 2'-O-methyluridine-3'-phosphate
  modified_base 17: mod_base = OTHER; note = 2'-O-methyluridine-3'-phosphorothioate
  modified_base 18: mod_base = OTHER; note = 2'-O-methylguanosine-3'-phosphorothioate
  modified_base 19: mod_base = OTHER; note 2'-O-methyluridine-3'-phosphate-N,N'-((5S)-6-((6-hydroxy-5- (lambda-3-methyl)hexyl)amino)-6-oxohexane-1,5-diyl)ditetrad ecanamide
cggtttggatatttattgt

SEQ ID NO: 1352 - RNA, 21 nt, synthetic construct
  source 1..21: mol_type = other RNA
  modified_base 1: mod_base = OTHER; note 5'-(E)-vinylphosphonate-2'-O-methyluridine-3'-phosphorothio ate
  modified_base 2: mod_base = OTHER; note = 2'-fluorocytidine-3'-phosphorothioate
  modified_base 3: mod_base = OTHER; note = 2'-O-methyladenosine-3'-phosphate
  modified_base 4: mod_base = OTHER; note = 2'-O-methyladenosine-3'-phosphate
  modified_base 5: mod_base = OTHER; note = 2'-O-methyluridine-3'-phosphate
  modified_base 6: mod_base = OTHER; note = 2'-fluoroadenosine-3'-phosphate
  modified_base 7: mod_base = OTHER; note = 2'-O-methyladenosine-3'-phosphate
  modified_base 8: mod_base = OTHER; note = 2'-O-methyladenosine-3'-phosphate
  modified_base 9: mod_base = OTHER; note = 2'-O-methyluridine-3'-phosphate
  modified_base 10: mod_base = OTHER; note = 2'-O-methyladenosine-3'-phosphate
  modified_base 11: mod_base = OTHER; note = 2'-O-methyluridine-3'-phosphate
  modified_base 12: mod_base = OTHER; note = 2'-O-methylcytidine-3'-phosphate
  modified_base 13: mod_base = OTHER; note = 2'-O-methylcytidine-3'-phosphate
  modified_base 14: mod_base = OTHER; note = 2'-fluoroadenosine-3'-phosphate
  modified_base 15: mod_base = OTHER; note = 2'-O-methyladenosine-3'-phosphate
  modified_base 16: mod_base = OTHER; note = 2'-fluoroadenosine-3'-phosphate
  modified_base 17: mod_base = OTHER; note = 2'-O-methylcytidine-3'-phosphate
  modified_base 18: mod_base = OTHER; note = 2'-O-methylcytidine-3'-phosphate
  modified_base 19: mod_base = OTHER; note = 2'-O-methylguanosine-3'-phosphorothioate
  modified_base 20: mod_base = OTHER; note = 2'-O-methylcytidine-3'-phosphorothioate
  modified_base 21: mod_base = OTHER; note = 2'-O-methylcytidine
tcaataaatatccaaaccgcc

SEQ ID NO: 1353 - RNA, 19 nt, synthetic construct
  source 1..19: mol_type = other RNA
  modified_base 1: mod_base = OTHER; note = 2'-fluorocytidine-3'-phosphorothioate
  modified_base 2: mod_base = OTHER; note = 2'-O-methylguanosine-3'-phosphorothioate
  modified_base 3: mod_base = OTHER; note = 2'-fluoroguanosine-3'-phosphate
  modified_base 4: mod_base = OTHER; note = 2'-O-methyluridine-3'-phosphate
  modified_base 5: mod_base = OTHER; note = 2'-fluorouridine-3'-phosphate
  modified_base 6: mod_base = OTHER; note = 2'-O-methyluridine-3'-phosphate
  modified_base 7: mod_base = OTHER; note = 2'-fluoroguanosine-3'-phosphate
  modified_base 8: mod_base = OTHER; note = 2'-O-methylguanosine-3'-phosphate
  modified_base 9: mod_base = OTHER; note = 2'-fluoroadenosine-3'-phosphate
  modified_base 10: mod_base = OTHER; note = 2'-O-methyluridine-3'-phosphate
  modified_base 11: mod_base = OTHER; note = 2'-fluoroadenosine-3'-phosphate
  modified_base 12: mod_base = OTHER; note = 2'-O-methyluridine-3'-phosphate
  modified_base 13: mod_base = OTHER; note = 2'-fluorouridine-3'-phosphate
  modified_base 14: mod_base = OTHER; note = 2'-O-methyluridine-3'-phosphate
  modified_base 15: mod_base = OTHER; note = 2'-fluoroadenosine-3'-phosphate
  modified_base 16: mod_base = OTHER; note = 2'-O-methyluridine-3'-phosphate
  modified_base 17: mod_base = OTHER; note = 2'-fluorouridine-3'-phosphorothioate
  modified_base 18: mod_base = OTHER; note = 2'-O-methylguanosine-3'-phosphorothioate
  modified_base 19: mod_base = OTHER; note 2'-fluorouridine-3'-phosphate-N,N'-((5S)-6-((6-hydroxy-5-(l ambda-3-methyl)hexyl)amino)-6-oxohexane-1,5-diyl)ditetradec anamide
cggtttggatatttattgt

SEQ ID NO: 1354 - RNA, 21 nt, synthetic construct
  source 1..21: mol_type = other RNA
  modified_base 1: mod_base = OTHER; note 5'-(E)-vinylphosphonate-2'-O-methyluridine-3'-phosphorothio ate
  modified_base 2: mod_base = OTHER; note = 2'-fluorocytidine-3'-phosphorothioate
  modified_base 3: mod_base = OTHER; note = 2'-O-methyladenosine-3'-phosphate
  modified_base 4: mod_base = OTHER; note = 2'-fluoroadenosine-3'-phosphate
  modified_base 5: mod_base = OTHER; note = 2'-O-methyluridine-3'-phosphate
  modified_base 6: mod_base = OTHER; note = 2'-fluoroadenosine-3'-phosphate
  modified_base 7: mod_base = OTHER; note = 2'-O-methyladenosine-3'-phosphate
  modified_base 8: mod_base = OTHER; note = 2'-fluoroadenosine-3'-phosphate
  modified_base 9: mod_base = OTHER; note = 2'-O-methyluridine-3'-phosphate
  modified_base 10: mod_base = OTHER; note = 2'-fluoroadenosine-3'-phosphate
  modified_base 11: mod_base = OTHER; note = 2'-O-methyluridine-3'-phosphate
  modified_base 12: mod_base = OTHER; note = 2'-fluorocytidine-3'-phosphate
  modified_base 13: mod_base = OTHER; note = 2'-O-methylcytidine-3'-phosphate
  modified_base 14: mod_base = OTHER; note = 2'-fluoroadenosine-3'-phosphate
  modified_base 15: mod_base = OTHER; note = 2'-O-methyladenosine-3'-phosphate
  modified_base 16: mod_base = OTHER; note = 2'-fluoroadenosine-3'-phosphate
  modified_base 17: mod_base = OTHER; note = 2'-O-methylcytidine-3'-phosphate
  modified_base 18: mod_base = OTHER; note = 2'-fluorocytidine-3'-phosphate
  modified_base 19: mod_base = OTHER; note = 2'-O-methylguanosine-3'-phosphorothioate
  modified_base 20: mod_base = OTHER; note = 2'-O-methylcytidine-3'-phosphorothioate
  modified_base 21: mod_base = OTHER; note = 2'-O-methylcytidine
tcaataaatatccaaaccgcc

SEQ ID NO: 1355 - RNA, 19 nt, synthetic construct
  source 1..19: mol_type = other RNA
  modified_base 1: mod_base = OTHER; note = 2'-fluorocytidine-3'-phosphorothioate
  modified_base 2: mod_base = OTHER; note = 2'-O-methylguanosine-3'-phosphorothioate
  modified_base 3: mod_base = OTHER; note = 2'-fluoroguanosine-3'-phosphate
  modified_base 4: mod_base = OTHER; note = 2'-O-methyluridine-3'-phosphate
  modified_base 5: mod_base = OTHER; note = 2'-fluorouridine-3'-phosphate
  modified_base 6: mod_base = OTHER; note = 2'-O-methyluridine-3'-phosphate
  modified_base 7: mod_base = OTHER; note = 2'-fluoroguanosine-3'-phosphate
  modified_base 8: mod_base = OTHER; note = 2'-O-methylguanosine-3'-phosphate
  modified_base 9: mod_base = OTHER; note = 2'-fluoroadenosine-3'-phosphate
  modified_base 10: mod_base = OTHER; note = 2'-O-methyluridine-3'-phosphate
  modified_base 11: mod_base = OTHER; note = 2'-fluoroadenosine-3'-phosphate
  modified_base 12: mod_base = OTHER; note = 2'-O-methyluridine-3'-phosphate
  modified_base 13: mod_base = OTHER; note = 2'-fluorouridine-3'-phosphate
  modified_base 14: mod_base = OTHER; note = 2'-O-methyluridine-3'-phosphate
  modified_base 15: mod_base = OTHER; note = 2'-fluoroadenosine-3'-phosphate
  modified_base 16: mod_base = OTHER; note = 2'-O-methyluridine-3'-phosphate
  modified_base 17: mod_base = OTHER; note = 2'-fluorouridine-3'-phosphate
  modified_base 18: mod_base = OTHER; note = 2'-O-methylguanosine-3'-phosphate
  modified_base 19: mod_base = OTHER; note 2'-fluorouridine-3'-phosphate-N,N'-((5S)-6-((6-hydroxy-5-(l ambda-3-methyl)hexyl)amino)-6-oxohexane-1,5-diyl)ditetradec anamide
cggtttggatatttattgt

SEQ ID NO: 1356 - RNA, 21 nt, synthetic construct
  source 1..21: mol_type = other RNA
  modified_base 1: mod_base = OTHER; note 5'-(E)-vinylphosphonate-2'-O-methyluridine-3'-phosphorothio ate
  modified_base 2: mod_base = OTHER; note = 2'-fluorocytidine-3'-phosphorothioate
  modified_base 3: mod_base = OTHER; note = 2'-O-methyladenosine-3'-phosphate
  modified_base 4: mod_base = OTHER; note = 2'-fluoroadenosine-3'-phosphate
  modified_base 5: mod_base = OTHER; note = 2'-O-methyluridine-3'-phosphate
  modified_base 6: mod_base = OTHER; note = 2'-fluoroadenosine-3'-phosphate
  modified_base 7: mod_base = OTHER; note = 2'-O-methyladenosine-3'-phosphate
  modified_base 8: mod_base = OTHER; note = 2'-fluoroadenosine-3'-phosphate
  modified_base 9: mod_base = OTHER; note = 2'-O-methyluridine-3'-phosphate
  modified_base 10: mod_base = OTHER; note = 2'-fluoroadenosine-3'-phosphate
  modified_base 11: mod_base = OTHER; note = 2'-O-methyluridine-3'-phosphate
  modified_base 12: mod_base = OTHER; note = 2'-fluorocytidine-3'-phosphate
  modified_base 13: mod_base = OTHER; note = 2'-O-methylcytidine-3'-phosphate
  modified_base 14: mod_base = OTHER; note = 2'-fluoroadenosine-3'-phosphate
  modified_base 15: mod_base = OTHER; note = 2'-O-methyladenosine-3'-phosphate
  modified_base 16: mod_base = OTHER; note = 2'-fluoroadenosine-3'-phosphate
  modified_base 17: mod_base = OTHER; note = 2'-O-methylcytidine-3'-phosphate
  modified_base 18: mod_base = OTHER; note = 2'-fluorocytidine-3'-phosphate
  modified_base 19: mod_base = OTHER; note = 2'-O-methylguanosine-3'-phosphorothioate
  modified_base 20: mod_base = OTHER; note = 2'-O-methylcytidine-3'-phosphorothioate
  modified_base 21: mod_base = OTHER; note = 2'-O-methylcytidine
tcaataaatatccaaaccgcc

SEQ ID NO: 1357 - RNA, 19 nt, synthetic construct
  source 1..19: mol_type = other RNA
  modified_base 1: mod_base = OTHER; note = 2'-O-methylcytidine-3'-phosphorothioate
  modified_base 2: mod_base = OTHER; note = 2'-O-methylguanosine-3'-phosphorothioate
  modified_base 3: mod_base = OTHER; note = 2'-O-methylguanosine-3'-phosphate
  modified_base 4: mod_base = OTHER; note = 2'-O-methyluridine-3'-phosphate
  modified_base 5: mod_base = OTHER; note = 2'-fluorouridine-3'-phosphate
  modified_base 6: mod_base = OTHER; note = 2'-O-methyluridine-3'-phosphate
  modified_base 7: mod_base = OTHER; note = 2'-fluoroguanosine-3'-phosphate
  modified_base 8: mod_base = OTHER; note = 2'-O-methylguanosine-3'-phosphate
  modified_base 9: mod_base = OTHER; note = 2'-fluoroadenosine-3'-phosphate
  modified_base 10: mod_base = OTHER; note = 2'-O-methyluridine-3'-phosphate
  modified_base 11: mod_base = OTHER; note = 2'-fluoroadenosine-3'-phosphate
  modified_base 12: mod_base = OTHER; note = 2'-O-methyluridine-3'-phosphate
  modified_base 13: mod_base = OTHER; note = 2'-fluorouridine-3'-phosphate
  modified_base 14: mod_base = OTHER; note = 2'-O-methyluridine-3'-phosphate
  modified_base 15: mod_base = OTHER; note = 2'-fluoroadenosine-3'-phosphate
  modified_base 16: mod_base = OTHER; note = 2'-O-methyluridine-3'-phosphate
  modified_base 17: mod_base = OTHER; note = 2'-O-methyluridine-3'-phosphorothioate
  modified_base 18: mod_base = OTHER; note = 2'-O-methylguanosine-3'-phosphorothioate
  modified_base 19: mod_base = OTHER; note 2'-O-methyluridine-3'-phosphate-N,N'-((5S)-6-((6-hydroxy-5- (lambda-3-methyl)hexyl)amino)-6-oxohexane-1,5-diyl)ditetrad ecanamide
cggtttggatatttattgt

SEQ ID NO: 1358 - RNA, 21 nt, synthetic construct
  source 1..21: mol_type = other RNA
  modified_base 1: mod_base = OTHER; note 5'-(E)-vinylphosphonate-2'-O-methyluridine-3'-phosphorothio ate
  modified_base 2: mod_base = OTHER; note = 2'-fluorocytidine-3'-phosphorothioate
  modified_base 3: mod_base = OTHER; note = 2'-O-methyladenosine-3'-phosphate
  modified_base 4: mod_base = OTHER; note = 2'-fluoroadenosine-3'-phosphate
  modified_base 5: mod_base = OTHER; note = 2'-O-methyluridine-3'-phosphate
  modified_base 6: mod_base = OTHER; note = 2'-fluoroadenosine-3'-phosphate
  modified_base 7: mod_base = OTHER; note = 2'-O-methyladenosine-3'-phosphate
  modified_base 8: mod_base = OTHER; note = 2'-fluoroadenosine-3'-phosphate
  modified_base 9: mod_base = OTHER; note = 2'-O-methyluridine-3'-phosphate
  modified_base 10: mod_base = OTHER; note = 2'-fluoroadenosine-3'-phosphate
  modified_base 11: mod_base = OTHER; note = 2'-O-methyluridine-3'-phosphate
  modified_base 12: mod_base = OTHER; note = 2'-fluorocytidine-3'-phosphate
  modified_base 13: mod_base = OTHER; note = 2'-O-methylcytidine-3'-phosphate
  modified_base 14: mod_base = OTHER; note = 2'-fluoroadenosine-3'-phosphate
  modified_base 15: mod_base = OTHER; note = 2'-O-methyladenosine-3'-phosphate
  modified_base 16: mod_base = OTHER; note = 2'-fluoroadenosine-3'-phosphate
  modified_base 17: mod_base = OTHER; note = 2'-O-methylcytidine-3'-phosphate
  modified_base 18: mod_base = OTHER; note = 2'-O-methylcytidine-3'-phosphate
  modified_base 19: mod_base = OTHER; note = 2'-O-methylguanosine-3'-phosphorothioate
  modified_base 20: mod_base = OTHER; note = 2'-O-methylcytidine-3'-phosphorothioate
  modified_base 21: mod_base = OTHER; note = 2'-O-methylcytidine
tcaataaatatccaaaccgcc

SEQ ID NO: 1359 - RNA, 19 nt, synthetic construct
  source 1..19: mol_type = other RNA
  modified_base 1: mod_base = OTHER; note = 2'-O-methylcytidine-3'-phosphorothioate
  modified_base 2: mod_base = OTHER; note = 2'-O-methylguanosine-3'-phosphorothioate
  modified_base 3: mod_base = OTHER; note = 2'-O-methylguanosine-3'-phosphate
  modified_base 4: mod_base = OTHER; note = 2'-O-methyluridine-3'-phosphate
  modified_base 5: mod_base = OTHER; note = 2'-fluorouridine-3'-phosphate
  modified_base 6: mod_base = OTHER; note = 2'-O-methyluridine-3'-phosphate
  modified_base 7: mod_base = OTHER; note = 2'-fluoroguanosine-3'-phosphate
  modified_base 8: mod_base = OTHER; note = 2'-O-methylguanosine-3'-phosphate
  modified_base 9: mod_base = OTHER; note = 2'-fluoroadenosine-3'-phosphate
  modified_base 10: mod_base = OTHER; note = 2'-O-methyluridine-3'-phosphate
  modified_base 11: mod_base = OTHER; note = 2'-fluoroadenosine-3'-phosphate
  modified_base 12: mod_base = OTHER; note = 2'-O-methyluridine-3'-phosphate
  modified_base 13: mod_base = OTHER; note = 2'-fluorouridine-3'-phosphate
  modified_base 14: mod_base = OTHER; note = 2'-O-methyluridine-3'-phosphate
  modified_base 15: mod_base = OTHER; note = 2'-fluoroadenosine-3'-phosphate
  modified_base 16: mod_base = OTHER; note = 2'-O-methyluridine-3'-phosphate
  modified_base 17: mod_base = OTHER; note = 2'-O-methyluridine-3'-phosphate
  modified_base 18: mod_base = OTHER; note = 2'-O-methylguanosine-3'-phosphate
  modified_base 19: mod_base = OTHER; note 2'-O-methyluridine-3'-phosphate-N,N'-((5S)-6-((6-hydroxy-5- (lambda-3-methyl)hexyl)amino)-6-oxohexane-1,5-diyl)ditetrad ecanamide
cggtttggatatttattgt

SEQ ID NO: 1360 - RNA, 19 nt, synthetic construct
  source 1..19: mol_type = other RNA
  modified_base 1: mod_base = OTHER; note 5'-(E)-vinylphosphonate-2'-O-methyluridine-3'-phosphorothio ate
  modified_base 2: mod_base = OTHER; note = 2'-fluorocytidine-3'-phosphorothioate
  modified_base 3: mod_base = OTHER; note = 2'-O-methyladenosine-3'-phosphate
  modified_base 4: mod_base = OTHER; note = 2'-fluoroadenosine-3'-phosphate
  modified_base 5: mod_base = OTHER; note = 2'-O-methyluridine-3'-phosphate
  modified_base 6: mod_base = OTHER; note = 2'-fluoroadenosine-3'-phosphate
  modified_base 7: mod_base = OTHER; note = 2'-O-methyladenosine-3'-phosphate
  modified_base 8: mod_base = OTHER; note = 2'-fluoroadenosine-3'-phosphate
  modified_base 9: mod_base = OTHER; note = 2'-O-methyluridine-3'-phosphate
  modified_base 10: mod_base = OTHER; note = 2'-fluoroadenosine-3'-phosphate
  modified_base 11: mod_base = OTHER; note = 2'-O-methyluridine-3'-phosphate
  modified_base 12: mod_base = OTHER; note = 2'-fluorocytidine-3'-phosphate
  modified_base 13: mod_base = OTHER; note = 2'-O-methylcytidine-3'-phosphate
  modified_base 14: mod_base = OTHER; note = 2'-fluoroadenosine-3'-phosphate
  modified_base 15: mod_base = OTHER; note = 2'-O-methyladenosine-3'-phosphate
  modified_base 16: mod_base = OTHER; note = 2'-fluoroadenosine-3'-phosphate
  modified_base 17: mod_base = OTHER; note = 2'-O-methylcytidine-3'-phosphorothioate
  modified_base 18: mod_base = OTHER; note = 2'-O-methylcytidine-3'-phosphorothioate
  modified_base 19: mod_base = OTHER; note = 2'-O-methylguanosine
tcaataaatatccaaaccg

SEQ ID NO: 1361 - RNA, 19 nt, synthetic construct
  source 1..19: mol_type = other RNA
  modified_base 1: mod_base = OTHER; note = 2'-fluorocytidine-3'-phosphorothioate
  modified_base 2: mod_base = OTHER; note = 2'-O-methylcytidine-3'-phosphorothioate
  modified_base 3: mod_base = OTHER; note = 2'-fluorouridine-3'-phosphate
  modified_base 4: mod_base = OTHER; note = 2'-O-methylcytidine-3'-phosphate
  modified_base 5: mod_base = OTHER; note = 2'-fluoroguanosine-3'-phosphate
  modified_base 6: mod_base = OTHER; note = 2'-O-methylguanosine-3'-phosphate
  modified_base 7: mod_base = OTHER; note = 2'-fluorouridine-3'-phosphate
  modified_base 8: mod_base = OTHER; note = 2'-O-methyladenosine-3'-phosphate
  modified_base 9: mod_base = OTHER; note = 2'-fluorouridine-3'-phosphate
  modified_base 10: mod_base = OTHER; note = 2'-O-methyluridine-3'-phosphate
  modified_base 11: mod_base = OTHER; note = 2'-fluorouridine-3'-phosphate
  modified_base 12: mod_base = OTHER; note = 2'-O-methyladenosine-3'-phosphate
  modified_base 13: mod_base = OTHER; note = 2'-fluorouridine-3'-phosphate
  modified_base 14: mod_base = OTHER; note = 2'-O-methyluridine-3'-phosphate
  modified_base 15: mod_base = OTHER; note = 2'-fluoroguanosine-3'-phosphate
  modified_base 16: mod_base = OTHER; note = 2'-O-methyluridine-3'-phosphate
  modified_base 17: mod_base = OTHER; note = 2'-fluorocytidine-3'-phosphorothioate
  modified_base 18: mod_base = OTHER; note = 2'-O-methyluridine-3'-phosphorothioate
  modified_base 19: mod_base = OTHER; note = 2'-fluoroadenosine
cctcggtatttattgtcta

SEQ ID NO: 1362 - RNA, 19 nt, synthetic construct
  source 1..19: mol_type = other RNA
  modified_base 1: mod_base = OTHER; note = 2'-fluorocytidine-3'-phosphorothioate
  modified_base 2: mod_base = OTHER; note = 2'-O-methylguanosine-3'-phosphorothioate
  modified_base 3: mod_base = OTHER; note = 2'-fluoroguanosine-3'-phosphate
  modified_base 4: mod_base = OTHER; note = 2'-O-methyluridine-3'-phosphate
  modified_base 5: mod_base = OTHER; note = 2'-fluorouridine-3'-phosphate
  modified_base 6: mod_base = OTHER; note = 2'-O-methyluridine-3'-phosphate
  modified_base 7: mod_base = OTHER; note = 2'-fluoroguanosine-3'-phosphate
  modified_base 8: mod_base = OTHER; note = 2'-O-methylguanosine-3'-phosphate
  modified_base 9: mod_base = OTHER; note = 2'-fluoroadenosine-3'-phosphate
  modified_base 10: mod_base = OTHER; note = 2'-O-methyluridine-3'-phosphate
  modified_base 11: mod_base = OTHER; note = 2'-fluoroadenosine-3'-phosphate
  modified_base 12: mod_base = OTHER; note = 2'-O-methyluridine-3'-phosphate
  modified_base 13: mod_base = OTHER; note = 2'-fluorouridine-3'-phosphate
  modified_base 14: mod_base = OTHER; note = 2'-O-methyluridine-3'-phosphate
  modified_base 15: mod_base = OTHER; note = 2'-fluoroadenosine-3'-phosphate
  modified_base 16: mod_base = OTHER; note = 2'-O-methyluridine-3'-phosphate
  modified_base 17: mod_base = OTHER; note = 2'-fluorouridine-3'-phosphorothioate
  modified_base 18: mod_base = OTHER; note = 2'-O-methylguanosine-3'-phosphorothioate
  modified_base 19: mod_base = OTHER; note = 2'-fluoroadenosine
cggtttggatatttattga

SEQ ID NO: 1363 - RNA, 19 nt, synthetic construct
  source 1..19: mol_type = other RNA
  modified_base 1: mod_base = OTHER; note = 2'-O-methylcytidine-3'-phosphorothioate
  modified_base 2: mod_base = OTHER; note = 2'-O-methylguanosine-3'-phosphorothioate
  modified_base 3: mod_base = OTHER; note = 2'-O-methylguanosine-3'-phosphate
  modified_base 4: mod_base = OTHER; note = 2'-O-methyluridine-3'-phosphate
  modified_base 5: mod_base = OTHER; note = 2'-fluorouridine-3'-phosphate
  modified_base 6: mod_base = OTHER; note = 2'-O-methyluridine-3'-phosphate
  modified_base 7: mod_base = OTHER; note = 2'-fluoroguanosine-3'-phosphate
  modified_base 8: mod_base = OTHER; note = 2'-O-methylguanosine-3'-phosphate
  modified_base 9: mod_base = OTHER; note = 2'-fluoroadenosine-3'-phosphate
  modified_base 10: mod_base = OTHER; note = 2'-O-methyluridine-3'-phosphate
  modified_base 11: mod_base = OTHER; note = 2'-fluoroadenosine-3'-phosphate
  modified_base 12: mod_base = OTHER; note = 2'-O-methyluridine-3'-phosphate
  modified_base 13: mod_base = OTHER; note = 2'-fluorouridine-3'-phosphate
  modified_base 14: mod_base = OTHER; note = 2'-O-methyluridine-3'-phosphate
  modified_base 15: mod_base = OTHER; note = 2'-fluoroadenosine-3'-phosphate
  modified_base 16: mod_base = OTHER; note = 2'-O-methyluridine-3'-phosphate
  modified_base 17: mod_base = OTHER; note = 2'-O-methyluridine-3'-phosphorothioate
  modified_base 18: mod_base = OTHER; note = 2'-O-methylguanosine-3'-phosphorothioate
  modified_base 19: mod_base = OTHER; note = 2'-O-methyladenosine
cggtttggatatttattga

SEQ ID NO: 1364 - RNA, 19 nt, synthetic construct
  source 1..19: mol_type = other RNA
  modified_base 1: mod_base = OTHER; note = 2'-O-methylcytidine-3'-phosphorothioate
  modified_base 2: mod_base = OTHER; note = 2'-O-methylguanosine-3'-phosphorothioate
  modified_base 3: mod_base = OTHER; note = 2'-O-methylguanosine-3'-phosphate
  modified_base 4: mod_base = OTHER; note = 2'-O-methyluridine-3'-phosphate
  modified_base 5: mod_base = OTHER; note = 2'-fluorouridine-3'-phosphate
  modified_base 6: mod_base = OTHER; note = 2'-O-methyluridine-3'-phosphate
  modified_base 7: mod_base = OTHER; note = 2'-O-methylguanosine-3'-phosphate
  modified_base 8: mod_base = OTHER; note = 2'-fluoroguanosine-3'-phosphate
  modified_base 9: mod_base = OTHER; note = 2'-fluoroadenosine-3'-phosphate
  modified_base 10: mod_base = OTHER; note = 2'-O-methyluridine-3'-phosphate
  modified_base 11: mod_base = OTHER; note = 2'-fluoroadenosine-3'-phosphate
  modified_base 12: mod_base = OTHER; note = 2'-O-methyluridine-3'-phosphate
  modified_base 13: mod_base = OTHER; note = 2'-fluorouridine-3'-phosphate
  modified_base 14: mod_base = OTHER; note = 2'-O-methyluridine-3'-phosphate
  modified_base 15: mod_base = OTHER; note = 2'-O-methyladenosine-3'-phosphate
  modified_base 16: mod_base = OTHER; note = 2'-O-methyluridine-3'-phosphate
  modified_base 17: mod_base = OTHER; note = 2'-O-methyluridine-3'-phosphorothioate
  modified_base 18: mod_base = OTHER; note = 2'-O-methylguanosine-3'-phosphorothioate
  modified_base 19: mod_base = OTHER; note = 2'-O-methyladenosine
cggtttggatatttattga

SEQ ID NO: 1365 - RNA, 19 nt, synthetic construct
  source 1..19: mol_type = other RNA
  modified_base 1: mod_base = OTHER; note = 2'-O-methylcytidine-3'-phosphorothioate
  modified_base 2: mod_base = OTHER; note = 2'-O-methylguanosine-3'-phosphorothioate
  modified_base 3: mod_base = OTHER; note = 2'-O-methylguanosine-3'-phosphate
  modified_base 4: mod_base = OTHER; note = 2'-O-methyluridine-3'-phosphate
  modified_base 5: mod_base = OTHER; note = 2'-fluorouridine-3'-phosphate
  modified_base 6: mod_base = OTHER; note = 2'-O-methyluridine-3'-phosphate
  modified_base 7: mod_base = OTHER; note = 2'-fluoroguanosine-3'-phosphate
  modified_base 8: mod_base = OTHER; note = 2'-fluoroguanosine-3'-phosphate
  modified_base 9: mod_base = OTHER; note = 2'-fluoroadenosine-3'-phosphate
  modified_base 10: mod_base = OTHER; note = 2'-O-methyluridine-3'-phosphate
  modified_base 11: mod_base = OTHER; note = 2'-O-methyladenosine-3'-phosphate
  modified_base 12: mod_base = OTHER; note = 2'-O-methyluridine-3'-phosphate
  modified_base 13: mod_base = OTHER; note = 2'-O-methyluridine-3'-phosphate
  modified_base 14: mod_base = OTHER; note = 2'-O-methyluridine-3'-phosphate
  modified_base 15: mod_base = OTHER; note = 2'-O-methyladenosine-3'-phosphate
  modified_base 16: mod_base = OTHER; note = 2'-O-methyluridine-3'-phosphate
  modified_base 17: mod_base = OTHER; note = 2'-O-methyluridine-3'-phosphorothioate
  modified_base 18: mod_base = OTHER; note = 2'-O-methylguanosine-3'-phosphorothioate
  modified_base 19: mod_base = OTHER; note = 2'-O-methyluridine
cggtttggatatttattgt